(19) United States
(12) Patent Application Publication
(10) Pub. No.: US 2017/0349919 A1
(43) Pub. Date: Dec. 7, 2017

(54) MICRO-ORGANISM FOR THE PRODUCTION OF STEREO-SPECIFIC S, S-2,3-BUTANEDIOL

(71) Applicant: DANMARKS TEKNISKE UNIVERSITET, Kgs. Lyngby (DK)

(72) Inventors: Christian Solem, Naerum (DK); Peter Ruhdal Jensen, Gentofte (DK); Jun Chen, Copenhagen NV (DK); Jianming Liu, Virum (DK)

(21) Appl. No.: 15/536,470

(22) PCT Filed: Dec. 18, 2015
(86) PCT No.: PCT/EP2015/080446

§ 371 Date: Jun. 15, 2017

(30) Foreign Application Priority Data
Dec. 19, 2014 (EP) 14199353.5
Oct. 27, 2015 (EP) 15191703.6

(51) Int. Cl. C12P 7/18; C12N 9/02

(52) U.S. Cl. CPC C12P 7/18; C12Y 101/01304; C12N 9/0036; C12Y 101/01076

(57) ABSTRACT

The invention relates to a genetically modified lactic acid bacterium capable of producing (S,S)-2,3-butanediol stereo specifically from glucose under aerobic conditions. Additionally the invention relates to a method for producing (S,S)-2,3-butanediol and L-acetoin using the genetically modified lactic acid bacterium, under aerobic conditions in the presence of a source of iron-containing porphyrin or a source of metal ions (Fe³⁺/Fe²⁺). The lactic acid bacterium is genetically modified to express heterologous genes encoding enzymes catalysing the stereo-specific synthesis of (S,S)-2,3-butandiol; and additionally a number of genes are deleted in order to maximise the production of (S,S)-2,3-butanediol as compared to other products of oxidative fermentation.

### FIELD OF THE INVENTION

[0001] The present invention provides a genetically modified lactic acid bacterium capable of producing (S,S)-2,3-butanediol stereo specifically from glucose under aerobic conditions. Additionally the invention provides a method for producing (S,S)-2,3-butanediol using the genetically modified lactic acid bacterium, under aerobic conditions in the presence of a source of iron-containing porphyrin or a source of metal ions (Fe³⁺/Fe²⁺). The lactic acid bacterium is genetically modified to express heterologous genes encoding a meso-2,3-butanediol dehydrogenase (E.C. 1.1.1.-), having diacetyl reductase ((S)-acetoin forming; E.C. 1.1.1.5/1.1.1.304) activity, and a L-butanediol dehydrogenase (E.C. 1.1.1.76). Additionally genes encoding polypeptides having lactate dehydrogenase (E.C 1.1.1.27/E.C.1.1.1.28); α-acetolactate decarboxylase (E.C 4.1.1.5); diacetyl reductase ((R)-acetoin forming; EC. 1.1.1.303); acetoin reductase (EC. 1.1.1.5); butanediol dehydrogenase ((R,R)-butane-2,3-diol forming; E.C. 1.1.1.4/1.1.1.-); a water-forming NADH oxidase (E.C. 1.6.3.4); and optionally phosphotransacetylase (E.C. 2.3.1.8) and alcohol dehydrogenase (E.C. 1.2.1.10); are deleted from the bacterium.

### BACKGROUND OF THE INVENTION

[0002] 2,3-butanediol (2,3-BDO) is a high value commodity chemical, usually produced petrochemically from oil. 2,3-butanediol, also known as 2,3-butylene glycol, dimethylene glycol, or dimethylethylene glycol, has many current and potential applications, including: plasticizers, aviation fuel, printing inks, perfumes, fumigants, spandex, and as a carrier for pharmaceuticals (Celinska & Grajek, 2009).

[0003] 2,3-butanediol exists in 3 isomeric forms: L-(+)-2,3-butanediol (S,S)-; D-(−)-2,3-butanediol (R,R)-; and meso-2,3-butanediol. The chiral forms of 2,3-BDO, in particular L-(+)-2,3-butanediol (S,S)-, have additional value in the provision of chiral groups required in the synthesis of drugs and liquid crystals.

[0004] The use of the synthetic machinery in microorganisms for the production of organic chemicals is desirable since it allows for synthesis of relatively complex compounds, such as 2,3-BDO or isomers thereof, while avoiding the harsh conditions associated with organic chemical synthesis, and often provides the added advantage of an improved yield and purity of the product.

[0005] 2,3-butanediol is synthesized by two different pathways in micro-organisms, in both cases from α-acetolactate. α-Acetolactate can be converted into one isomer of acetoin, namely D-acetoin, by α-acetolactate decarboxylase and D-acetoin can then be converted into either meso- or (R, R)-2,3-butanediol depending on the properties of BDH that is present. In the presence of oxygen, however, α-acetolactate is unstable and can be converted into diacetyl that can also be enzymatically reduced into L-acetoin and further to L-(+)-2,3-butanediol. Bacterial strains differ as to which stereoisomers of 2,3-butanediol is formed, dependent on the stereo-specificity of the expressed 2,3-butanediol dehydrogenases. Three 2,3-BD dehydrogenases are proposed to exist: meso-2,3-BD dehydrogenase (D-(−)-acetoin forming), meso-2,3-BD dehydrogenase (L-(+)-acetoin forming), and L-(+)-2,3-BD dehydrogenase (Ui et al., 1984, Ji et al., 2011).

[0006] The microbial production of 2,3-butanediol (2,3-BDO) and its isomers requires a suitable host micro-organism. One option is to select a natural producer, but unfortunately the most efficient 2,3-BDO producers (Klebsiella pneumonia, Klebsiella oxytoca, Enterobacter aerogenes, Serratia marcescens as well as an engineered stain of Escherichia coli), are all categorized by the World Health Organization (WHO) as risk group 2 species (pathogenic), which makes their use in the large-scale production of 2,3-BDO particularly challenging and costly (Biswas et al., 2012). Another decisive factor in selecting a host micro-organism, is to identify a host that can produce 2,3-BDO, and/or isomers thereof, from inexpensive renewable raw materials via an efficient bio-conversion process.

[0007] Ui et al (2004) describe genetically engineered E. coli capable of converting diacetyl to L-(+)-2,3-butanediol (S,S-2,3-BDO), as the main chiral form, by the simultaneous expression of a meso-2,3-butandiol dehydrogenase gene having diacetyl reductase activity, encoded by the BudC from Klebsiella pneumonia IAM 1063; and a L-(+)2,3-butanediol dehydrogenase gene derived from Brevibacterium saccharolyticum. However, its use in the production of S,S-2,3-BDO requires a supply of the substrate diacetyl.

[0008] Members of the Lactic acid bacteria genus provide a safer alternative, since they are included in the FDA GRAS list. Members, such as Lactococcus lactis (L. lactis), are potentially efficient bio-convertors, since they are able to channel >90% of metabolized sugar into fermentation products (Thomas, 1976), at a higher rate than other established production organisms. Furthermore, although some L. lactis strains, especially the dairy isolates, are quite fastidious, they are able to grow in cheap media based on whey or condensed corn soluble, a fuel ethanol production byproduct (Wolf-Hall et al., 2009).

[0009] Lactococcus lactis (L. lactis) has genes encoding the enzymes needed for making 2,3-butanediol, but most strains do not normally produce 2,3-butanediol, and in exceptional cases (L. lactis subsp. lactis biovar. diacetylactis strains) only in minor amounts when grown in the presence of citrate (Crow, 1990). In order to take advantages of lactic acid bacteria as a safe host for production of (S,S)-2,3-butanediol, there is a need for developing strains of lactic acid bacteria that are capable of stereo-specifically producing (S,S)-2,3-butanediol in improved yields from cheap raw materials.

### SUMMARY OF THE INVENTION

[0010] The invention provides a genetically modified lactic acid bacterium for production of S,S-2,3-butanediol, wherein said microorganism comprises:
[0011] a) one transgene encoding a polypeptide, wherein the polypeptide has an enzymatic activity of both a diacetyl reductase (E.C.1.1.1.304) and a L-butanediol dehydrogenase (E.C. 1.1.1.76); or
   [0012] two transgenes encoding two polypeptides, wherein one polypeptide has an enzymatic activity of a diacetyl reductase (E.C.1.1.1.304) and the second polypeptide has an enzymatic activity of a L-butanediol dehydrogenase (E.C. 1.1.1.76);
   [0013] and whereby expression of said one or two transgenes in said microorganism confers the capability to convert diacetyl to S,S-2,3-butanediol;
   [0014] and wherein the genome of said lactic acid bacterium is deleted for genes or lacks genes encoding polypeptides having an enzymatic activity of:
[0015] b) lactate dehydrogenase (E.C 1.1.1.27 or E.C.1.1.1.28),
[0016] c) α-acetolactate decarboxylase (E.C 4.1.1.5)
[0017] d) diacetyl reductase (E.C.1.1.1.303)
[0018] e) butanediol dehydrogenase (E.C. 1.1.1.4)
[0019] f) acetoin reductase (EC:1.1.1.5) and
[0020] g) NADH oxidase (E.C. 1.6.3.4).

[0021] In a further embodiment, the genome of said genetically modified lactic acid bacterium is additionally deleted for genes encoding polypeptides having an enzymatic activity of:
[0022] h) a phosphotransacetylase (E.C.2.3.1.8) and
[0023] i) an alcohol dehydrogenase (E.C. 1.2.1.10).

[0024] According to further embodiment, the genetically modified lactic acid bacterium comprises one transgene encoding one polypeptide, wherein the polypeptide has an enzymatic activity of a diacetyl reductase (E.C.1.1.1.304) and a L-butanediol dehydrogenase (E.C. 1.1.1.76) and is capable of converting diacetyl to S,S-2,3-butanediol.

[0025] In a further embodiment, the genetically modified lactic acid bacterium belongs to a genus selected from the group consisting of Lactococcus, Lactobacillus, Pediococcus, Leuconostoc, Streptococcus, Oenococcus, and Bacillus.

[0026] The invention also provides a method for the production of S,S-2,3-butanediol, comprising the steps of: a) introducing the genetically modified lactic acid bacterium of the invention into a growth medium to produce a culture, b) providing a source of protoporphyrin IX and/or iron-containing porphyrin or providing a source of Fe³⁺ ions, c) providing aerobic culture conditions, d) recovering S,S-2,3-butanediol produced by said culture, and optionally e) isolating the recovered S,S-2,3-butanediol.

[0027] The invention also includes the use of the genetically modified lactic acid bacterium of the invention for production of S,S-2,3-butanediol and additionally L-acetoin.

### Abbreviations and Terms

[0028] gi number: (genInfo identifier) is a unique integer which identifies a particular sequence, independent of the database source, which is assigned by NCBI to all sequences processed into Entrez, including nucleotide sequences from DDBJ/EMBL/GenBank, protein sequences from SWISS-PROT, PIR and many others.

[0029] Amino acid sequence identity: The term “sequence identity” as used herein, indicates a quantitative measure of the degree of homology between two amino acid sequences of substantially equal length. The two sequences to be compared must be aligned to give a best possible fit, by means of the insertion of gaps or alternatively, truncation at the ends of the protein sequences. The sequence identity can be calculated as ((Nref-Ndif)100)/(Nref), wherein Ndif is the total number of non-identical residues in the two sequences when aligned and wherein Nref is the number of residues in one of the sequences. Hence, the peptide sequence AGTCAGTC will have a sequence identity of 75% with the sequence AATCAATC (Ndif=2 and Nref=8). A gap is counted as non-identity of the specific residue(s), i.e. the peptide sequence AGTGTC will have a sequence identity of 75% with the peptide sequence AGTCAGTC (Ndif=2 and Nref=8). Sequence identity can alternatively be calculated by the BLAST program e.g. the BLASTP program (Pearson W. R and D. J. Lipman (1988)) (www.ncbi.nlm.nih.gov/cgi-bin/BLAST). In one embodiment of the invention, alignment is performed with the sequence alignment method ClustalW with default parameters as described by Thompson J., et al 1994, available at http://www2.ebi.ac.uk/clustalw/.

[0030] Preferably, the numbers of substitutions, insertions, additions or deletions of one or more amino acid residues in the polypeptide as compared to its comparator polypeptide is limited, i.e. no more than 1, 2, 3, 4, 5, 6, 7, 8, 9, or 10 substitutions, no more than 1, 2, 3, 4, 5, 6, 7, 8, 9, or 10 insertions, no more than 1, 2, 3, 4, 5, 6, 7, 8, 9, or 10 additions, and no more than 1, 2, 3, 4, 5, 6, 7, 8, 9, or 10 deletions. Preferably the substitutions are conservative amino acid substitutions: limited to exchanges within members of group 1: Glycine, Alanine, Valine, Leucine, Isoleucine; group 2: Serine, Cysteine, Selenocysteine, Threonine, Methionine; group 3: Proline; group 4: Phenylalanine, Tyrosine, Tryptophan; Group 5: Aspartate, Glutamate, Asparagine, and Glutamine.

[0031] Deleted gene: the deletion of a gene from the genome of a microbial cell leads to a loss of function of the gene and hence where the gene encodes a polypeptide the deletion results in a loss of expression of the encoded polypeptide. Where the encoded polypeptide is an enzyme, the gene deletion leads to a loss of detectable enzymatic activity of the respect polypeptide in the microbial cell.

[0032] Native gene: endogenous gene in a microbial cell genome, homologous to host micro-organism.

### DESCRIPTION OF THE FIGURES

[0033] FIG. 1 Cartoon showing the modifications of the metabolic pathway of a lactic acid bacterium for the stereo-specific production of (S,S)-2,3-butanediol.

[0034] FIG. 2 HPLC product profile of strain CS4701 derived from Lactococcus lactis subsp. cremoris was grown under aerobic conditions in M17 medium supplemented with 2% glucose as carbon source, and hemin supplied at a concentration of 5 μg/ml (A); 1 μg/ml (B); 0.5 μg/ml (C) and 0.1 μg/ml (D). The (S,S)-2,3-butanediol peak (highlighted) is detected at 17.3 minutes.

[0035] FIG. 3 HPLC diagrams of butanediol isomers detected in a fermentation sample obtained from a cell culture of CS4701m derived from Lactococcus lactis subsp. cremoris grown under aerobic conditions in M17 medium supplemented with 60 mM glucose (10.8. g/l glucose) as carbon source, and 10 mM Fe³⁺. Upper and middle panels shows HPLC diagrams of 10 mM meso-2,3-butandiol and 10 mM (S,S)-2,3-butandiol respectively run as standards; and the lower panel is the HPLC diagram of the fermentation sample.

[0036] FIG. 4 Cartoon showing that stereo-specific production of (S,S)-2,3-butanediol in the genetically modified L. lactis strain of the invention, expressing a diacetyl-insensitive L-butanediol dehydrogenase, is characterized by a balanced redox due to re-cycling of NADH produced in glycolysis by the reduction reactions in the synthesis of (S,S)-2,3-butanediol.

### DETAILED DESCRIPTION

### I A Lactic Acid Bacterium for Production of (S,S)-2,3-butanediol

[0037] The present invention provides a genetically modified lactic acid bacterium capable of producing (S,S)-2,3-butanediol stereo specifically from glucose under aerobic conditions. According to a first embodiment, the bacterium of the invention comprises two transgenes: (1) encoding a meso-2,3-butanediol dehydrogenase (E.C. 1.1.1.-), having strong diacetyl reductase activity (E.C.1.1.1.5/1.1.1.304) for converting diacetyl (DA) to L-acetoin (L-AC); and (2) a L-butanediol dehydrogenase (E.C.1.1.1.76) converting L-AC to L-BD. Although L-butanediol dehydrogenases are known to convert DA to L-AC, this activity is very weak, and furthermore DA is known to act as a competitive inhibitor of the reduction of L-AC. Hence, the efficient conversion of diacetyl (DA) to L-BD requires a two-step reaction catalyzed by these two enzymes.

[0038] The bacterium of the invention is also characterized by inactivation of a number of metabolic pathways to enhance metabolic flux from pyruvate for diacetyl, which is the precursor in the pathway for stereospecific synthesis of (S,S)-2,3-butanediol.

[0039] The bacterium of the invention is also characterized by inactivation of the endogenous 2,3-butanediol synthesis pathway.

[0040] The bacterium of the invention is also characterized by an inactivated water forming cytoplasmic NADH oxidase in order to maintain and balance NADH reducing capacity required for reductive synthesis of (S,S)-2,3-butanediol.

[0041] The production of (S,S)-2,3-butanediol by the lactic acid bacterium of the invention under aerobic conditions, is thought to be mediated via a synthetic pathway illustrated in FIG. 1, including the synthetic intermediates: pyruvate, α-acetolactate, diacetyl, and L-acetoin. The conversion of α-acetolactate into diacetyl occurs by chemical oxidation, provided that the lactic acid bacterium of the invention is maintained under aerobic conditions. Diacetyl, derived from oxidation of α-acetolactate, is the substrate for the stereo-specific production of (S,S)-2,3-butanediol via L-acetoin catalyzed by meso-2,3-butanediol dehydrogenase (E.C. 1.1.1.-) and a L-butanediol dehydrogenase (E.C. 1.1.1.76).

[0042] Production of (S,S)-2,3-butanediol by the lactic acid bacterium according to the first embodiment of the invention requires specific cultivation conditions. While not being bound by theory, it is hypothesized that the aerobic conditions required for chemical oxidation of α-acetolactate, activates cellular NADH oxidase activity depriving the cell of sufficient NADH reducing power needed for (S,S)-2,3-butanediol. While inactivation of the water forming cytoplasmic NADH oxidase in the lactic acid bacterium of the invention prevents the depletion of cellular NADH levels under aerobic growth conditions, the cells are then unable to chemically oxidize α-acetolactate. Surprisingly, the provision of a supply of iron-containing porphyrin, in limited amounts, is shown to be essential for the lactic acid bacterium according to the first embodiment of the invention to grow and facilitates its production of (S,S)-2,3-butanediol.

[0043] The features of the genetically modified lactic acid bacterium, according to the first embodiment of the invention, are described in further detail below.

### Ii Transgenic Expression of an Enzyme Having Diacetyl Reductase Activity

[0044] The bacterium of the invention expresses a polypeptide having diacetyl reductase (DAR) activity (E.C:1.1.1.5/1.1.1.304) that converts diacetyl (DA) to L-acetoin (L-AC). The amino acid sequence of the polypeptide has at least 70, 72, 74, 76, 78, 80, 82, 84, 86, 88, 90, 92, 94, 96, 98, 99 or 100% sequence identity to the amino acid sequence of the meso-2,3-butanediol dehydrogenase encoded by the Klebsiella pneumonia budC gene (SEQ ID NO: 2). Alternatively, the polypeptide having diacetyl reductase (DAR) activity (E.C:1.1.1.5/1.1.1.304), has the amino acid sequence selected from among SEQ ID NO: 4 (derived from Enterobacter aerogenes KCTC 2190); SEQ ID NO: 6 (derived from Serratia sp. ATCC 39006); SEQ ID NO: 8 (derived from Pluralibacter gergoviae strain FB2); and SEQ ID NO: 10 (derived from Kosakonia sacchari SP1).

### Iii Transgenic Expression of an Enzyme Having L-butanediol Dehydrogenase Activity

[0045] A polypeptide having L-butanediol dehydrogenase (E.C. 1.1.1.76) converting L-acetoin (L-AC) to (S,S)-2,3-butanediol, comprises an amino acid sequence having at least 70, 72, 74, 76, 78, 80, 82, 84, 86, 88, 90, 92, 94, 96, 98, 99 or 100% sequence identity to the amino acid sequence of the L-(+)-2,3-butanediol dehydrogenase (SEQ ID NO:12) derived from Brevibacterium saccharolyticum budC gene. For example, the polypeptide having L-(+)-2,3-butanediol dehydrogenase activity may be selected from a polypeptide having amino acid sequence SEQ ID NO:14 (derived from Corynebacterium glutamicum); or SEQ ID NO: 16 (derived from Microbacterium paraoxydans).

[0046] One or both of the DAR and L-BDH enzymatic activities and their corresponding enzymatic structural domains (as described above) may be present in individual proteins, each encoded by a gene, or one or both of the enzymatic activities may be present in a fusion protein, where the fusion protein comprises at least both active enzymatic structural domains encoded by a gene. The gene in the micro-organism of the invention that expresses a polypeptide having one or both active DAR and L-BDH enzymatic domains, may be a transgene that is adapted for expression in the selected host cell, by employing a codon usage optimized for the given lactic acid bacterial cell, such codon optimization being well-known in the art. Nucleic acid molecules encoding a polypeptide having one or more enzymatic domain can be synthesized chemically, where the nucleic acid sequence of the molecule is selected to provide the codon usage optimized for the given host cell. The nucleic acid sequence of DNA molecules encoding the respective DAR and L-BDH enzymatic activities of the (S,S)-2,3-butanediol pathway are exemplified in the sequence listing.

[0047] In some embodiments, one or more of the genes encoding one or more polypeptide having an enzymatic activity associated with the invention is expressed in a recombinant expression vector. As used herein, a “vector” may be any of a number of nucleic acids into which a desired sequence or sequences may be inserted by restriction and ligation for transport between different genetic environments or for expression in a host cell. Vectors are typically composed of DNA, although RNA vectors are also available. Vectors include, but are not limited to: plasmids, fosmids, phagemids, virus genomes and artificial chromosomes. A suitable vector includes one which is able to replicate autonomously (self-replicating vector) or is integrated (integration vector) in the genome in a host cell, and which is further characterized by one or more endonuclease restriction sites at which the vector may be cut in a determinable fashion and into which a desired DNA sequence may be ligated such that the new recombinant vector retains its ability to replicate in the host cell. In the case of plasmids, replication of the desired sequence may occur many times as the plasmid increases in copy number within the host cell such as a host bacterium; or may occur just a single time per host before the host reproduces by mitosis. In the case of phage, replication may occur actively during a lytic phase or passively during a lysogenic phase.

[0048] When the one or more genes encoding one or more polypeptide having DAR and L-BDH enzymatic activity required for (S,S)-2,3-butanediol synthesis are expressed in a micro-organism of the invention, a variety of transcription control sequences (e.g., promoter/enhancer sequences) may be operably joined to the coding sequence encoding the respective polypeptide, such as to direct its expression. The promoter can be a native promoter, i.e., the promoter of the gene in its endogenous context, which provides normal regulation of expression of the gene. In some embodiments the promoter can be constitutive, i.e., the promoter is unregulated allowing for continual transcription of its associated gene. A variety of conditional promoters also can be used, such as promoters controlled by the presence or absence of a molecule.

[0049] The precise nature of the regulatory sequences needed for gene expression may vary between species or cell types, but shall in general include, as necessary, 5′ non-transcribed and 5′ non-translated sequences involved with the initiation of transcription and translation respectively, such as a TATA box, capping sequence, CAAT sequence, and the like. In particular, such 5′ non-transcribed regulatory sequences will include a promoter region which includes a promoter sequence for transcriptional control of the operably joined gene. Regulatory sequences may also include enhancer sequences or upstream activator sequences as desired. The vectors of the invention may optionally include 5′ leader or signal sequences. The choice and design of an appropriate vector is within the ability and discretion of one of ordinary skill in the art.

[0050] Methods for introducing one or more transgene encoding the encoding polypeptides having one or more enzymatic activities into a host micro-organism of the invention is described in section III.

### Iiii Endogenous Genes Deleted to Enhance Metabolic Flux from Pyruvate to Diacetyl

[0051] The lactic acid bacterium of the invention is adapted to produce (S,S)-2,3-butanediol from glucose under aerobic conditions. The lactic acid bacterium of the invention is characterised by an enhanced metabolic flux from pyruvate to diacetyl, due to reduced activity in the enzymes in the pathways leading to the synthesis of lactate, acetate and ethanol. Deletion of genes encoding enzymes of the lactate pathway in the lactic acid bacterium reduces the metabolic flux towards lactate. The production of acetate and ethanol by the lactic acid bacterium of the invention is reduced when the bacterium is cultivated under aerobic conditions, in a defined growth medium lacking lipoic acid. When the bacterium is cultivated under aerobic conditions, this inactivates the enzyme pyruvate formate lyase that forms formate and acetyl-CoA, which are the precursors of the acetate and ethanol pathways. Since the enzyme, pyruvate dehydrogenase, requires lipoic acid for activity, the use of a lipoic acid-deficient growth medium (supplemented with acetate) inactivates the synthesis of acetyl-CoA by pyruvate dehydrogenase and the down-stream production of acetate and ethanol. When the lactic acid bacterium of the invention is grown under anaerobic conditions in a minimal medium deficient in lipoic acid, the requirement for acetyl-CoA is met by adding acetate to the growth medium.

[0052] In another embodiment, the metabolic flux towards lactate, acetate and ethanol in the lactic acid bacterium of the invention is reduced by deletion of one or more genes encoding enzymes of both the lactate, acetate and ethanol pathways.

[0053] Deletion of the lactate pathway: The lactic acid bacterium of the invention is characterised by knockouts of one or more endogenous native gene encoding a polypeptide having lactate dehydrogenase activity causing a block in the lactate synthesis pathway in the bacterium. Deletion of at least one gene (e.g. ldh) encoding a lactate dehydrogenase enzyme (E.C 1.1.1.27 or E.C.1.1.1.28) provides a lactic acid bacterium of the invention that is depleted in lactate production. For example, where the lactic acid bacterium of the invention belongs to a given genus, the deleted endogenous gene is one encoding a polypeptide having lactate dehydrogenase activity in that genus. Preferably the polypeptide having lactate dehydrogenase activity (E.C 1.1.1.27 or E.C.1.1.1.28) has at least 70, 72, 74, 76, 78, 80, 82, 84, 86, 88, 90, 92, 94, 96, 98, 99 or 100% amino acid sequence identity to one of the following sequences: SEQ ID NO: 18 in a Lactococcus species (e.g. Lactococcus lactis); SEQ ID NO: 20, 22, or 24 in a Lactobacillus species (e.g. Lactobacillus acidophilus); SEQ ID NO: 26 in a Lactobacillus species (e.g. Lactobacillus delbrueckii); SEQ ID NO. 28, 30 or 32 in a Lactobacillus species (e.g. Lactobacillus casei), SEQ ID NO. 34 or 36 in a Lactobacillus species (e.g. Lactobacillus plantarum); SEQ ID NO: 38 in a Pediococcus species (e.g. Pediococcus pentosaceus), SEQ ID NO: 40 or 42 in a Leuconostoc species (e.g. Leuconostoc mesenteroides), SEQ ID NO: 44 in a Streptococcus species (e.g. Streptococcus thermophilus), SEQ ID NO: 46 or 48 in a Oenococcus species (e.g. Oenococcus oeni), and SEQ ID NO: 50 or 52 in a Bacillus species (e.g. Bacillus coagulans).

[0054] In one embodiment, an additional endogenous gene, encoding a polypeptide having lactate dehydrogenase enzymatic activity (E.C 1.1.1.27 or E.C.1.1.1.28), is deleted from the lactic acid bacterium of the invention. For example, where the lactic acid bacterium of the invention belongs to the genus Lactococcus, the deleted gene (IdhX) encodes a polypeptide having at least 70, 72, 74, 76, 78, 80, 82, 84, 86, 88, 90, 92, 94, 96, 98, 99 or 100% amino acid sequence identity to SEQ ID NO: 54.

[0055] In one embodiment, an additional endogenous gene, encoding a polypeptide having lactate dehydrogenase enzymatic activity (E.C 1.1.1.27 or E.C.1.1.1.28), is deleted from the lactic acid bacterium of the invention. For example, where the lactic acid bacterium of the invention belongs to the genus Lactococcus, the deleted gene (ldhB) encodes a polypeptide having at least 70, 72, 74, 76, 78, 80, 82, 84, 86, 88, 90, 92, 94, 96, 98, 99 or 100% amino acid sequence identity to SEQ ID NO: 56. Further, where the lactic acid bacterium of the invention belongs to the genus Lactococcus, the three genes (Idh, IdhB and IdhX) encoding a polypeptide having at least 70% amino acid sequence identity to SEQ ID NO: 18, 54 and 56 respectively may be deleted.

[0056] Deletion of the acetate pathway: In one embodiment, the lactic acid bacterium of the invention is characterised by knockout of the endogenous native gene encoding a phosphotransacetylase (E.C.2.3.1.8), causing a block in the acetate synthesis pathway in the bacterium. Deletion of a gene (e.g. pta) encoding a phosphotransacetylase enzyme provides a lactic acid bacterium of the invention that is blocked in acetate production. For example, where the lactic acid bacterium of the invention belongs to a given genus, the deleted endogenous gene is one encoding a polypeptide having phosphotransacetylase activity (E.C.2.3.1.8) in that genus. Preferably the polypeptide having phosphotransacetylase activity has at least 70, 72, 74, 76, 78, 80, 82, 84, 86, 88, 90, 92, 94, 96, 98, 99 or 100% amino acid sequence identity to one of the following sequences: SEQ ID NO: 58 in a Lactococcus species (e.g. Lactococcus lactis); SEQ ID NO: 60, 62, 64, and 66 in a Lactobacillus species (e.g. Lactobacillus acidophilus, Lactobacillus delbrueckii, Lactobacillus casei, Lactobacillus plantarum), SEQ ID NO: 68 in a Pediococcus species (e.g. Pediococcus pentosaceus), SEQ ID NO: 70 in a Leuconostoc species (e.g. Leuconostoc mesenteroides), SEQ ID NO: 72 in a Streptococcus species (e.g. Streptococcus thermophilus), SEQ ID NO: 74 Oenococcus species (e.g. Oenococcus oeni), and SEQ ID NO:

[0057] 76 in a Bacillus species (e.g. Bacillus coagulans).

[0058] Deletion of the ethanol pathway: In one embodiment, the lactic acid bacterium of the invention is characterised by knockout of the endogenous native gene encoding alcohol dehydrogenase (E.C.1.2.1.10) causing a block in the ethanol synthesis pathway in the bacterium. Deletion of the gene encoding an alcohol dehydrogenase enzyme provides a lactic acid bacterium of the invention that is blocked in ethanol production.

[0059] For example, where the lactic acid bacterium of the invention belongs to a given genus, the deleted endogenous gene (e.g. adhE) is one encoding a polypeptide having alcohol dehydrogenase activity (E.C.1.2.1.10) in that genus. Preferably the polypeptide having alcohol dehydrogenase activity has at least 70, 72, 74, 76, 78, 80, 82, 84, 86, 88, 90, 92, 94, 96, 98, 99 or 100% amino acid sequence identity to one of the following sequences: SEQ ID NO: 78 in a Lactococcus species (e.g. Lactococcus lactis); SEQ ID NO: 80 in a Lactobacillus species (e.g. Lactobacillus acidophilus); SEQ ID NO: 82 or 84 in a Lactobacillus species (e.g. Lactobacillus casei); SEQ ID NO: 86 in a Lactobacillus species (e.g., Lactobacillus plantarum), SEQ ID NO: 88 in a Leuconostoc species (e.g. Leuconostoc mesenteroides), SEQ ID NO: 90 in a Streptococcus species (e.g. Streptococcus thermophilus), SEQ ID NO: 92 in a Oenococcus species (e.g. Oenococcus oeni), and SEQ ID NO: 94 in a Bacillus species (e.g. Bacillus coagulans).

### Iiv Endogenous Genes Deleted to Block the Endogenous 2,3-butanediol Synthesis Pathway

[0060] The lactic acid bacterium of the invention is characterized by knockouts of the endogenous native genes encoding enzymes having α-acetolactate decarboxylase (E.C 4.1.1.5), a diacetyl reductase (EC:1.1.1.303); acetoin reductase (EC:1.1.1.5), and a 2,3-butanediol dehydrogenase ((R,R)-butane-2,3-diol forming; E.C 1.1.1.4/1.1.1.-) activity, thereby causing a block in the 2,3-butanediol synthesis pathway in the bacterium for conversion of α-acetolactate, via D-acetoin or diacetyl, to 2,3-butanediol. Deletion of the endogenous native genes provides a lactic acid bacterium of the invention that is blocked in 2,3-butanediol production. In the case that the lactic acid bacterium of the invention belongs to a given genus, that lacks one or more endogenous native gene encoding one or more polypeptide having α-acetolactate decarboxylase activity (E.C 4.1.1.5), diacetyl reductase (EC:1.1.1.303); acetoin reductase (EC:1.1.1.5), 2,3-butanediol dehydrogenase (E.C 1.1.1.4/1.1.1.-) activity or any combination thereof; the step of deletion of the respective gene in order to produce the bacterium of the invention is not required.

[0061] Accordingly the lactic acid bacterium of the invention lacks endogenous native genes that express enzymes having α-acetolactate decarboxylase (E.C 4.1.1.5), diacetyl reductase (EC.1.1.1.303); acetoin reductase (EC:1.1.1.5), and a 2,3-butanediol dehydrogenase ((R,R)-butane-2,3-diol forming; E.C 1.1.1.4/1.1.1.-) activity, either due to the absence of genes encoding and expressing said enzymes in the lactic acid bacterium of the invention, or due to deletion of the respective gene from the genome of the bacterium.

[0062] Deletion of an endogenous native gene (e.g. aldB) encoding an α-acetolactate decarboxylase enzyme (E.C 4.1.1.5) provides a lactic acid bacterium of the invention that is blocked in D-acetoin production. For example, where the lactic acid bacterium of the invention belongs to a given genus, the deleted endogenous gene is one encoding a polypeptide having α-acetolactate decarboxylase activity (E.C 4.1.1.5) in that genus.

[0063] Preferably the polypeptide having α-acetolactate decarboxylase activity has at least 70, 72, 74, 76, 78, 80, 82, 84, 86, 88, 90, 92, 94, 96, 98, 99 or 100% amino acid sequence identity to one of the following sequences: SEQ ID NO: 96 in a Lactococcus species (e.g. Lactococcus lactis); SEQ ID NO: 98, or 100 in a Lactobacillus species (e.g. Lactobacillus casei, Lactobacillus plantarum), SEQ ID NO: 102 in a Pediococcus species (e.g. Pediococcus pentosaceus), SEQ ID NO: 104 or 106 Leuconostoc species (e.g. Leuconostoc mesenteroides), SEQ ID NO: 108 in a Streptococcus species (e.g. Streptococcus thermophilus), SEQ ID NO: 110 in a Oenococcus species (e.g. Oenococcus oeni), and SEQ ID NO: 112 in a Bacillus species (e.g. Bacillus coagulans).

[0064] Deletion of an endogenous native gene (e.g. dar) encoding diacetyl reductase (EC:1.1.1.303) provides a lactic acid bacterium of the invention that is blocked in D-acetoin production. For example, where the lactic acid bacterium of the invention belongs to the genus Lactococcus (e.g. Lactococcus lactis), the deleted gene (dar) encodes a polypeptide having at least 70, 72, 74, 76, 78, 80, 82, 84, 86, 88, 90, 92, 94, 96, 98, 99 or 100% amino acid sequence identity to SEQ ID NO: 114.

[0065] Deletion of an endogenous native gene (e.g. ar) encoding an acetoin reductase enzyme (E.C 1.1.1.5) provides a lactic acid bacterium of the invention that is blocked in D-acetoin production. For example, where the lactic acid bacterium of the invention belongs to a given genus, the deleted endogenous gene is one encoding a polypeptide having D-acetoin reductase activity (E.C 1.1.1.5) in that genus. Preferably the polypeptide having D-acetoin reductase activity has at least 70, 72, 74, 76, 78, 80, 82, 84, 86, 88, 90, 92, 94, 96, 98, 99 or 100% amino acid sequence identity to one of the following sequences: SEQ ID NO: 116 in a Lactococcus species (e.g. Lactococcus lactis); SEQ ID NO: 118 in a Pediococcus species (e.g. Pediococcus pentosaceus), SEQ ID NO: 120 or 122 in a Leuconostoc species (e.g. Leuconostoc mesenteroides), SEQ ID NO: 124 or 126 Oenococcus species (e.g. Oenococcus oeni), and SEQ ID NO: 128 in a Bacillus species (e.g. Bacillus coagulans); SEQ ID NO: 214 or 216 in a Lactobacillus species (e.g. Lactobacillus buchneri).

[0066] Deletion of a gene (e.g. butAB) encoding 2,3-butanediol dehydrogenase activity (E.C 1.1.1.4/1.1.1.-) provides a lactic acid bacterium of the invention that is blocked in meso-2,3-butanediol production. For example, where the lactic acid bacterium of the invention belongs to the genus Lactococcus (e.g. Lactococcus lactis), the deleted gene (butAB) encodes a polypeptide having at least 70, 72, 74, 76, 78, 80, 82, 84, 86, 88, 90, 92, 94, 96, 98, 99 or 100% amino acid sequence identity to SEQ ID NO: 130.

### Iv Endogenous Genes Deleted to Block the Endogenous NADH Oxidation

[0067] The lactic acid bacterium of the invention is characterised by a knockout of the endogenous native gene(s) encoding a water-forming NADH oxidase causing a block in NADH oxidation, and maintenance of reduced NADH levels. Deletion of a gene (e.g. noxE) provides a lactic acid bacterium of the invention that is partially blocked in NADH oxidation.

[0068] For example, where the lactic acid bacterium of the invention belongs to a given genus, the deleted endogenous gene is one encoding a polypeptide having water-forming NADH oxidase activity (E.C. 1.6.3.4) in that genus. Preferably the polypeptide having NADH oxidase activity activity has at least 70, 72, 74, 76, 78, 80, 82, 84, 86, 88, 90, 92, 94, 96, 98, 99 or 100% amino acid sequence identity to one of the following sequences: SEQ ID NO: 132 in a Lactococcus species (e.g. Lactococcus lactis); SEQ ID NO: 134 in Lactobacillus casei), SEQ ID NO: 136, 138, 140, 142 and 144 in Lactobacillus plantarum, SEQ ID NO: 146 in a Streptococcus species (e.g. Streptococcus thermophilus), SEQ ID NO: 148, 150 and 152 in a Bacillus species (e.g. Bacillus coagulans).

[0069] In the case that the lactic acid bacterium of the invention belongs to a given genus, that lacks an endogenous native gene encoding one or more polypeptide having water-forming NADH oxidase activity (E.C. 1.6.3.4) activity; the step of deletion of the respective gene in order to produce the bacterium of the invention is not required. Accordingly the lactic acid bacterium of the invention lacks endogenous native genes that express an enzyme having water-forming NADH oxidase activity (E.C. 1.6.3.4) activity, either due to the absence of gene encoding said enzyme in the lactic acid bacterium of the invention, or due to deletion of the respective gene from the genome of the bacterium.

### II A Lactic Acid Bacterium Comprising a Pathway for (S,S)-2,3-butanediol Synthesis

[0070] The lactic acid bacterium according to the first or second embodiment of the invention, comprising a pathway for synthesis of (S,S)-2,3-butanediol, is a member of a genus of lactic acid bacteria selected from the group consisting of Lactococcus, Lactobacillus, Pediococcus, Leuconostoc, Streptococcus, Oenococcus, and Bacillus. The lactic acid bacterium of the invention may for example be a species of lactic acid bacteria selected from the group consisting of Lactococcus lactis, Lactobacillus acidophilus, Lactobacillus delbrueckii, Lactobacillus casei, Lactobacillus plantarum, Pediococcus pentosaceus, Leuconostoc mesenteroides, Streptococcus thermophilus, Oenococcus oeni and Bacillus coagulans.

### III Methods for Producing a Micro-Organism of the Invention

[0071] Integration and self-replicating vectors suitable for cloning and introducing one or more gene encoding one or more a polypeptide having an enzymatic activity associated with (S,S)-2,3-butanediol synthesis in a lactic acid bacterium according to the first or second embodiment of the invention are commercially available and known to those skilled in the art (see, e.g., Sambrook et al., Molecular Cloning: A Laboratory Manual, Second Edition, Cold Spring Harbor Laboratory Press, 1989). Cells of a micro-organism are genetically engineered by the introduction into the cells of heterologous DNA (RNA). Heterologous expression of genes encoding one or more polypeptide having an enzymatic activity associated with (S,S)-2,3-butanediol synthesis in a micro-organism of the invention is demonstrated in the Examples.

[0072] A nucleic acid molecule, that encodes one or more polypeptide having an enzymatic activity associated with (S,S)-2,3-butanediol synthesis according to the invention, can be introduced into a cell or cells and optionally integrated into the host cell genome using methods and techniques that are standard in the art. For example, nucleic acid molecules can be introduced by standard protocols such as transformation including chemical transformation and electroporation, transduction, particle bombardment, etc. Expressing the nucleic acid molecule encoding the enzymes of the claimed invention also may be accomplished by integrating the nucleic acid molecule into the genome.

[0073] Deletion of endogenous genes in a host lactic acid bacterium to obtain a lactic acid bacterium according to the first or second embodiment of the invention can be achieved by a variety of methods; for example by transformation of the host cell with linear DNA fragments containing a locus for resistance to an antibiotic, or any other gene allowing for rapid phenotypic selection, flanked by sequences homologous to closely spaced regions on the cell chromosome on either side of the gene to be deleted, in combination with the immediate subsequent deletion or inactivation of the recA gene. By selecting for a double-crossover event between the homologous sequences, shown by the antibiotic resistance or other detectable phenotype, a chromosome disruption can be selected for which has effectively deleted an entire gene. Inactivation or deletion of the recA gene prevents recombination or incorporation of extrachromosomal elements from occurring, thereby resulting in a bacterial strain which is useful for screening for functional activity or production of genetically engineered proteins in the absence of specific contaminants. An example describing the deletion of IdhX, IdhB, Idh, pta, adhE, butBA, aldB and noxE from L. lactis given in Example 1, illustrates one method for deleting these genes.

### IV A Method for Producing (S,S)-2,3-butanediol

[0074] (S,S)-2,3-butanediol can be produced using a lactic acid bacterium according to the first embodiment of of the invention by introducing the bacterium into a culture medium comprising a carbon source for (S,S)-2,3-butanediol biosynthesis; providing the culture with a source of protoporphyrin IX or iron-containing porphyrin (e.g, hemin and hematin) and incubating under aerobic conditions; and finally recovering the (S,S)-2,3-butanediol produced by the culture, as illustrated in the Examples.

[0075] The lactic acid bacterium of the invention will produce (S,S)-2,3-butanediol when supplied with a suitable carbon source including glucose, maltose, galactose, fructose, sucrose, arabinose, xylose, raffinose, mannose, and lactose.

[0076] A supply of iron-containing porphyrin, in limited amounts, is essential for the lactic acid bacterium of the invention to grow and produce (S,S)-2,3-butanediol. In a preferred embodiment, the protoporphyrin IX or iron-containing porphyrin is provided to the culture, by addition to the culture medium either prior to and subsequent to the introduction of the lactic acid bacterium into the culture medium. The protoporphyrin IX or iron-containing porphyrin may be added continuously or as a batch addition to the culture during incubation of the culture. For example hemin is preferably added in amounts to provide a final concentration in the liquid culture medium of 0.1-5 μg/ml.

[0077] The culture is incubated under aerobic conditions; such conditions being provided by shaking/agitating/stirring the culture under aerobic conditions; or sparging the culture with a source of oxygen. When the lactic acid bacterium of the invention is a strain of Lactococcus lactic, the preferred temperature for cultivation is 30° C.; while the selection of a suitable temperature for growth of lactic acid bacteria of the invention belonging to other Genus lies within the competence of the skilled man.

[0078] Where (S,S)-2,3-butanediol is secreted by the lactic acid bacterium of the invention, the (S,S)-2,3-butanediol can be recovered from the growth medium; and where the (S,S)-2,3-butanediol is an intracellular product, it can be recovered from cells of the micro-organism of the invention by permeabilization of cell membranes combined with extraction of the (S,S)-2,3-butanediol, employing standard methods for extraction, including solvent extraction as illustrated in the examples.

### V A Lactic Acid Bacterium for Production of (S,S)-2,3-butanediol Comprising a Diacetyl Insensitive Metabolic Pathway

[0079] According to a second embodiment, the present invention provides a genetically modified lactic acid bacterium capable of producing (S,S)-2,3-butanediol stereo specifically from glucose under aerobic conditions; where the bacterium is characterized by three aspects:
[0080] 1. comprising one transgene: encoding a polypeptide capable of catalyzing the conversion of DA to L-AC (having diacetyl reductase activity; E.C.1.1.1.304) as well catalyzing the conversion of L-AC to L-BD (having L-butanediol dehydrogenase activity; E.C.1.1.1.76);
[0081] 2. inactivation of a one or more metabolic pathways to enhance metabolic flux from pyruvate for diacetyl, which is the precursor in the pathway for stereospecific synthesis of (S,S)-2,3-butanediol;
[0082] 3. being capable of producing a high-yield of (S,S)-2,3-butanediol by means of a combination of chemical catalysis (metal catalysis) and metabolic pathways.

[0083] The polypeptide having both diacetyl reductase and L-butanediol dehydrogenase activity, expressed by the genetically modified lactic acid bacterium, is characterized by retaining enzymatic activity in the presence of ≧5 mM diacetyl. Preferably the polypeptide retains enzymatic activity in the presence of ≧10 mM, ≧15 mM, ≧20 mM, ≧25 mM; ≧30 mM; ≧35 mM, ≧40 mM; ≧50 mM; ≧55 mM; ≧60 mM or ≧70 mM diacetyl. The amino acid sequence of the polypeptide has at least 70, 72, 74, 76, 78, 80, 82, 84, 86, 88, 90, 92, 94, 96, 98, 99 or 100% sequence identity to the amino acid sequence of the L-butanediol dehydrogenase (SEQ ID NO: 218) (derivable from Enterobacter cloacae bdh gene). Alternatively, the polypeptide having diacetyl reductase and L-butanediol dehydrogenase activity has the amino acid sequence selected from among SEQ ID NO: 220 (derived from Klebsiella pneumoniae budC/dar; ADI56519.1; GI:298108447); SEQ ID NO: 222 (derived from Kluyvera intermedia budC/dar; WP_047370614.1; GI:829955571); and SEQ ID NO: 224 (derived from Enterobacter spp WP_014882919).

[0084] Enhanced metabolic flux pyruvate for diacetyl in the genetically modified lactic acid bacterium, is due to reduced activity of one or more enzyme in the pathways leading to the formation of one or more of lactate, ethanol and acetate. The genetically modified lactic acid bacterium according to the second embodiment of the invention is characterized by the inactivation of genes encoding enzymes in the lactate, and optionally also acetate and ethanol pathways (as described in section Iiii). Additionally, stereospecific synthesis of (S,S)-2,3-butanediol is enhanced in the genetically modified lactic acid bacterium according to the second embodiment by deletion of endogenous genes encoding enzymes in the native butandiol synthesis pathway (as described in section Iiv). Additionally, in order to obtain a balanced redox state in the genetically modified lactic acid bacterium according to the second embodiment, the endogenous native gene(s) encoding a water-forming NADH oxidase are deleted (e.g. noxE) (as described in section Iv).

[0085] While not being bound by theory, it is hypothesized that the redox status of the genetically modified lactic acid bacterium according to the second embodiment of the invention, is balanced because the NADH generated by glycolysis (2 mol NADH per mol glucose) is then oxidized during the conversion of diacetyl to (S,S)-2,3-butanediol; thereby regenerating NAD (2 mol NADH are consumed per mol (S,S)-2,3-butanediol from diacetyl).

[0086] The lactic acid bacterium according to the second embodiment, comprising a diacetyl insensitive metabolic pathway for synthesis of (S,S)-2,3-butanediol, is a member of a genus of lactic acid bacteria as described in Section II.

[0087] Methods for producing a genetically modified lactic acid bacterium according to the second embodiment of the invention are described in section III.

### VI A Method for Producing (S,S)-2,3-butanediol Using a Lactic Acid Bacterium Comprising a Diacetyl Insensitive Metabolic Pathway

[0088] (S,S)-2,3-butanediol can be produced using a genetically modified lactic acid bacterium according to the second embodiment of the invention by the steps of: introducing the bacterium into a culture medium comprising a carbon source for (S,S)-2,3-butanediol biosynthesis; providing the culture with a source of Fe³⁺; incubating the culture under aerobic conditions; and finally recovering the (S,S)-2,3-butanediol produced by the culture, as illustrated in Example 3. Importantly, a source of protoporphyrin IX or iron-containing porphyrin (e.g, hemin and hematin) is not present in, nor is it added to, the culture medium; i.e. essentially all sources of protoporphyrin IX or iron-containing porphyrin are excluded from the culture medium. This is because the redox balance obtained by culturing the cells in a growth medium comprising a source of Fe³⁺ requires that endogenous hemin-inducible pathways leading to NADH oxidation are not activated.

[0089] The lactic acid bacterium of the invention will produce (S,S)-2,3-butanediol, when supplied with a suitable carbon source including glucose, maltose, galactose, fructose, sucrose, arabinose, xylose, raffinose, mannose, and lactose. Preferably the final concentration of the carbon source in the growth medium is equivalent to 0-100 mM glucose.

[0090] A supply of Fe³⁺ ions, in an amount of at least 2 mM, is essential for the lactic acid bacterium according to the second embodiment of the invention to grow. Surprisingly, when provided with a sufficient supply of Fe³⁺ ions, cells of the lactic acid bacterium are able to produce (S,S)-2,3-butanediol with an efficiency that is close to the maximum possible. For example, yields of 0.89 mol (S,S)-2,3-butanediol/mol glucose (corresponding to 89% of the maximum theoretical yield) was demonstrated using a genetically modified Lactococcus lactis bacterium according to the second embodiment of the invention (see Example 3).

[0091] The source of Fe³⁺ ions is provided to the culture, by addition to the culture medium either prior to and subsequent to the introduction of the lactic acid bacterium into the culture medium. The supply of Fe³⁺ ions may be added continuously or as a batch addition to the culture during incubation of the culture. For example Fe³⁺ ions are preferably added in amounts to provide a final concentration in the liquid culture medium in the range of 3 to 30 mM; more preferably, in the range of 3 to 25 mM; for example in the range of 5 to 20 mM.

[0092] The culture is incubated under aerobic conditions; such conditions being provided by shaking/agitating/stirring the culture under aerobic conditions; or sparging the culture with a source of oxygen. When the lactic acid bacterium of the invention is a strain of Lactococcus lactic, the preferred temperature for cultivation is 30° C.; while the selection of a suitable temperature for growth of lactic acid bacteria of the invention belonging to other Genus lies within the competence of the skilled man.

[0093] Where (S,S)-2,3-butanediol is secreted by the lactic acid bacterium of the invention, the (S,S)-2,3-butanediol can be recovered from the growth medium; and where the (S,S)-2,3-butanediol is an intracellular product, it can be recovered from cells of the micro-organism of the invention by permeabilization of cell membranes combined with extraction of the (S,S)-2,3-butanediol, employing standard methods for extraction, including solvent extraction as illustrated in the examples.

### VII A Method of Detecting (S,S)-2,3-butanediol Produced

[0094] Methods for detecting and quantifying (S,S)-2,3-butanediol produced by a micro-organism of the invention include high performance liquid chromatography (HPLC) combined with Refractive Index detection to identify and quantify (S,S)-2,3-butanediol and its biosynthetic precursors, relative to a set of standards for each step of their biosynthetic pathway, as described herein, as illustrated in the examples.

### EXAMPLES

### Example 1 Genetic Modification of a Lactococcus lactis Strain for Production of S, S-2,3-butanediol

[0095] The genetic modifications required to produce a Lactococcus lactis strain that is capable of producing (S,S)-2,3-butanediol from diacetyl and to efficiently direct the flux towards this compound include the inactivation of all alternative product pathways, as described below.

### 1.1 Host Strains and Plasmids

[0096] The plasmid-free strain Lactococcus lactis subsp. cremoris MG1363 (Gasson, 1983) or derivatives thereof were used as the parent strain for the genetic construction of a strain capable of producing S,S-2,3-butanediol. E. coli strain ABLE-C (E. coli C lac(LacZ-)[Kanr McrA-McrCB-McrF-Mrr-HsdR (rk-mk-)][F′proAB lacIqZΔM15 Tn10(Tetr)]) (Stratagene) was used for cloning purposes. The plasmid pCS1966 (Solem et al., 2008), was used for the purpose of deleting various genes in L. lactis. The plasmid pCI372 (Hayes et al., 1990) was used for expressing the synthetic dar-bdh operon.

### 1.2 DNA Techniques

[0097] All manipulations were performed according to Sambrook et al., (1989). PCR primers used can be seen in TABLE 1. PfuX7 polymerase (Norøholm, 2010) was used for PCR applications. Chromosomal DNA from L. lactis was isolated using the method described for E. coli with the modification that cells were treated with 20 μg of lysozyme per ml for 2 hours before lysis. Cells of E. coli were transformed using electroporation. Cells of L. lactis were made electrocompetent by growth in GM17 medium containing 1% glycine and transformed by electroporation as previously described by Holo and Nes (1989).

[0098] The plasmid vector pCS1966 (Solem et al., 2008) was used for deleting genes in L. lactis. Plasmids employed for deleting chromosomal genes were prepared by PCR amplifying approximately 800 base pairs (bp) regions upstream and downstream of the L. lactis chromosomal region to be deleted using the PCR primers and chromosomal DNA isolated from L. lactis. The primers used for amplifying the upstream and downstream regions are indicated in TABLE 1 as “geneX ups.” and geneX dwn”. The amplified fragments and the plasmid, pCS1966, were then digested with the respective restriction enzymes indicated in the primer table, prior to inserting the fragment into the plasmid. The resulting plasmids were transformed into the parent strain individually and gene deletion was performed as described by Solem C, et al. (2008). Specifically, the plasmids were transformed into the strains via electroporation, and the strains comprising the plasmids integrated into the chromosome were selected for on M17 plates supplemented with glucose and erythromycin. Afterwards, the transformants were purified and plated on SA glucose plates supplemented with 5-fluoroorotate, thereby selecting for strains in which the plasmid had been lost by homologous recombination. The successful deletions were verified by PCR (Solem et al., 2008).

### 1.3 Deleting Genes from the Lactococcus lactis subsp. cremoris

[0099] The following genes were deleted from the Lactococcus lactis subsp. cremoris parent strain IdhX, IdhB, Idh, pta, adhE, butBA, aldB and noxE. The genes were deleted using gene deletion plasmids derived from pCS1966 designated as: pCS4026 (IdhX), pCS4020 (IdhB), pCS4104 (Idh), pCS4230 (pta), pCS4273 (adhE), pCS4491 (butBA), pCS4495 (aldB) and pCS4256 (noxE), constructed as described above (Example 1.2).

[0100] Deletion of the genes from the Lactococcus lactis subsp. cremoris parent strain was verified by PCR amplification of the respective gene using primers 774/777 (IdhX), 769/771 (IdhB), 788/789 (Idh), 880/881(pta), 929/930 (adhE), 977/979 (butBA), 1117/1119 (aldB), 887/890 (noxE).

TABLE 1
Strains and plasmids

| Designation | Genotype or description | Reference |
|---|---|---|
| L. lactis strains | | |
| CS4363 | MG1363 Δ³ldh Δpta ΔadhE | Solem et al., 2013 |
| CS4311 | MG1363 Δ³ldh Δpta ΔadhE pCS4268 | This work |
| CS4502 | *MG1363 Δ³ldh Δpta ΔadhE ΔbutBA pCS4268 | This work |
| CS4525 | *MG1363 Δ³ldh Δpta ΔadhE ΔbutBA ΔaldB pCS4268 | This work |
| CS4554 | MG1363 ΔldhX ΔldhB Δpta ΔadhE ΔbutBA ΔaldB ΔnoxE | This work |
| | pCS4268 | |
| CS4562 | MG1363 Δ³ldh ΔadhE ΔbutBA ΔaldB ΔnoxE pCS4564 | This work |
| CS4616 | MG1363 Δ³ldh Δpta ΔadhE ΔbutBA ΔaldB ΔnoxE pCS4564 | This work |
| CS4616m | MG1363 Δ³ldh Δpta ΔadhE ΔbutBA ΔaldB ΔnoxE | This work |
| CS4634 | MG1363 pCS4634 (pCI372::SP-budC-bdh) | This work |
| CS4701 | MG1363 Δ³ldh Δpta ΔadhE ΔbutBA ΔaldB ΔnoxE pCS4634 | This work |
| CS4701m | MG1363 Δ³ldh Δpta ΔadhE ΔbutBA ΔaldB ΔnoxE pJM001 | This work |
| Plasmids | | |
| pG⁺host8 | E. coli/L. lactis shuttle vector, Tet^{R}, thermosensitive | Maguin et al., 1996 |
| | replicon | |
| pCS4268 | pG⁺host8::SP-idh (L. lactis) | This work |
| pCS4564 | pG⁺host8::SP-idhA (E. coli) | This work |
| pCI372 | E. coli/L. lactis shuttle vector, Cam^{R} | Hayes et al., 1990 |
| pCS4518 | pCI372::gusA | This work |
| pCS4634 | pCS4518::SP-budC-bdh | This work |
| pJM001 | pTD6::FP-bdh | This work |

*Indicates that the chromosomal ldh may have reverted to wild-type by recombination with pCS4268; Δ³ldh = Δldh ΔldhX ΔldhB; SP signifies Synthetic Promoter. FP means fixed promoter, ATAGATTAGTTTATTCTTGACACTACAAGCTAAATGTGGTATAATCCCATAGA [SEQ ID NO: 225] (-35 and -10 underlined).

[0101] The strain containing the three lactate dehydrogenase deletions (Idh, IdhB, IdhX) was named CS4099 or MG1363Δ3Idh. CS4234 was derived from CS4099, by additionally the deleting a phosphotransacetylase gene, pta. The CS4234 strain deleted for the three Idh genes had poor growth properties; so to facilitate growth of the strain and its subsequent genetic modifications, the CS4234 strain was transformed with a plasmid with a thermosensitive replicon carrying L. lactis Idh expressed from a synthetic promoter (SP), to give strain CS4268. The plasmid was prepared as follows: an SP-Idh fragment was amplified from L. lactis using primers 710/926, was digested with XbaI/XhoI and inserted into pG+host8 plasmid (Maguin et al., 1996) digested with the same enzymes, and the ligated plasmid was then introduced into the CS4234 strain. CS4311 was derived from strain

[0102] CS4268 by deletion of adhE; CS4502 was derived from strain CS4311 by deletion of butBA, and CS4525 was derived from strain CS4502 by deletion of deleted a/dB. CS4554 was derived from strain CS4525 by deletion of noxE, but in this strain Idh was found to have reverted to wild-type (Idh) due to a recombination event between the deleted Idh locus and the intact Idh gene on the pG+host8 plasmid. CS4562 was derived from strain CS4554 lacking the pG+host8 plasmid, but substituted by another pG+host8 plasmid carrying an E. coli IdhA (pCS4564). The plasmid pCS4564 was constructed in the following manner: SP-IdhA was amplified from E. coli using 1130/1131, digested with XhoI/XbaI and inserted into pG+host8 digested with the same enzymes. The chromosomal Idh was then deleted from CS4562 thus giving rise to CS4615 (MG1363 ΔIdh ΔIdhX ΔIdhB Δpta ΔadhE ΔbutBA ΔaldB ΔnoxE pCS4564).

### 1.4 Introducing Codon-Optimized Diacetyl Reductase (dar) and Butanediol Dehydrogenase (bdh) into Lactococcus lactis subsp. cremoris Strain CS4615

[0103] A synthetic codon-optimized operon consisting of budC/dar gene sequence (encoding diacetyl/acetoin reductase, accession no. AF098800) from Klebsiella pneumonia tranascriptionally fused to a budC/bdh gene sequence (encoding acetoin reductase, accession no. AB009078) from Brevibacterium saccharolyticum was ordered from GenScript. The gene sequence, encoding an Aldolase leader sequence, (from L. lactis): 1-30; fused to a first gene sequence, budC: 31-798 (without stop codon, 801 with stop codon TAA), fused to a gene sequence, encoding the gapB leader (from L. lactis): 802-828, fused to a second gene bdh: 829-1602 (1605 with stop codon TAA included) and finally fused to the groEL2 transcriptional terminator (from L. lactis): 1606-1642.

[0104] Plasmid pCS4518 was constructed by ligating PCR amplified pCI372 (primers 1112/1113) with gusA PCR amplified from E. coli MG1655 (primers 991/992) that was treated with T4 PNK. Plasmid pCS4518 was then amplified using primers 1113/991, and joined using T4 DNA ligase to SP-dar-bdh amplified using 893/975, (treated with T4 polynucleotide kinase) and then introduced in E. coli TOP10, used as a host. Plasmids isolated from the pool of transformants were introduced into the deletion strain MG1363 and a clone (CS4634) showing the highest expression of the dar-bdh operon was selected and its plasmid (pCS4634) was isolated. pCS4634 was then introduced into the non-integrating plasmid

[0105] CS4615 (MG1363 ΔIdhΔIdhX ΔIdhB Δpta ΔadhE ΔbutBA ΔaldB ΔnoxE pCS4564); where after the plasmid pCS4564 was lost by incubation at 36° C. The resulting strain was CS4701.

TABLE 2

| Primer | | |
|---|---|---|
| name | Primer use | Primer sequence (5′→3′) |
| 43 (T3) | Verify insert | AATTAACCCTCACTAAAGGG [SEQ ID NO: 153] |
| | in pCS1966 | |
| 603 | Verify insert | ATCAACCTTTGATACAAGGTTG [SEQ ID NO: 154] |
| | in pCS1966 | |
| 710 | SP-ldh, XbaI | CTAGTCTAGANNNNAGTTTATTCTTGACANNNNNNNNNNN |
| | | NNTGRTATAATNNNNAAGTAATAAAATATTCGGAGGAATTTTG |
| | | AAATGGCTGATAAACAACGTAAG [SEQ ID NO: 155] |
| 768 | ldhB ups., | AATTCCTGCAGCATATTAAATAATGAACAAGTCATTC [SEQ ID |
| | PstI | NO: 156] |
| 769 | ldhB ups., | TAGTGGATCCTGGTAAATCCAAACACAACAAC [SEQ ID NO: |
| | BamHI | 157] |
| 770 | ldhB dwn., | AATTCCTGCAGTAATTTCCAGCTCTTACAATAAC [SEQ ID NO: |
| | PstI | 158] |
| 771 | ldhB dwn., | GACCTCGAGTCAGAAACTTTCTTTACCAGAG [SEQ ID NO: 159] |
| | XhoI | |
| 772 | pCS1966, | GCGGGGATCCACTAGTTCTAG [SEQ ID NO: 160] |
| | BamHI | |
| 773 | pCS1966, | ATACCGTCGACCTCGAG [SEQ ID NO: 161] |
| | XhoI | |
| 774 | ldhX ups., | TAGTGGATCCCTGTTTCAGGTCTTGGATAG [SEQ ID NO: 162] |
| | BamHI | |
| 775 | ldhX ups., | CCGATGAATTCTCATTAGCACGTTTAACAAGAG [SEQ ID NO: |
| | EcoRI | 163] |
| 776 | ldhX dwn., | CCGATGAATTCATCAGCGTAGTCTGCTGC [SEQ ID NO: 164] |
| | EcoRI | |
| 777 | ldhX dwn., | CGGGGTACCATTTAATCCTAAAGTCGTTATTAC [SEQ ID NO: |
| | KpnI | 165] |
| 785 | ldh ups., | CCGATGAATTCTTAAGTCAAGACAACGAGGTC [SEQ ID NO: |
| | EcoRI | 166] |
| 786 | ldh dwn, | CCGATGAATTCGACCTTGTTGAAAAAAATCTTC [SEQ ID NO: |
| | EcoRI | 167] |
| 787 | ldh ups., | TAGTGGATCCGTACAATGGCTACTGTTAAC [SEQ ID NO: 168] |
| | BamHI | |
| 788 | ldh dwn., | GACCTCGAGGATGAACAGACTTTTTTATTATAG [SEQ ID NO: |
| | XhoI | 169] |
| 789 | Verify ldh | AAAACCAGGTGAAACTCGTC [SEQ ID NO: 170] |
| | deletion | |
| 791 | adhB rev, | TCGGACTGCAGTTAAAATGCTGATAAAAACAATTCTTC +SEQ |
| | PstI | ID NO: 171] |
| 827 | pCS1966, | ATACCGTCGACCTCGAG [SEQ ID NO: 172] |
| | BamHI | |
| 828 | pCS1966, | CGATAAGCTTGATATCGAATTC [SEQ ID NO: 173] |
| | XhoI | |
| 830 | adhB fwd, | CCGATGAATTCTATAAGGAGAATTAGAATGGCAAGTAGTACAT |
| | EcoRI | TTT ATATTC [SEQ ID NO: 174] |
| 878 | pta ups., | ATCCCTCGGTTACAAGTTTCU [SEQ ID NO: 175] |
| | USER | |
| 879 | pta dwn., | AGAAACTTGTAACCGAGGGAUAATAATAGATTGAAATTCTGTC |
| | USER | AG [SEQ ID NO: 176] |
| 880 | pta ups., | ATTCGATATCAAGCTTATCGAUCAAAAATTGTGGTAGAATATA |
| | USER | TAG [SEQ ID NO: 177] |
| 881 | pta dwn., | AGGTCGACGGTATCGATAAUCCTAGTTCAATTGATGTGAC |
| | USER | [SEQ ID NO: 178] |
| 882 | pCS1966, | ATCGATAAGCTTGATATCGAAU [SEQ ID NO: 179] |
| | USER | |
| 883 | pCS1966, | ATTATCGATACCGTCGACCU [SEQ ID NO: 180] |
| | USER | |
| 887 | noxE ups, | ATTCGATATCAAGCTTATCGAUATTTAAAAATGATTGCAACAT |
| | USER | ATAAC [SEQ ID NO: 181] |
| 888 | noxE ups, | ATAGGTCTCCTTTAAATGTAAAAU [SEQ ID NO: 182] |
| | USER | |
| 889 | noxE dwn, | ATTTTACATTTAAAGGAGACCTAUTAGAAATCTATCTGCTTGA |
| | USER | TAG [SEQ ID NO: 183] |
| 890 | noxE dwn, | AGGTCGACGGTATCGATAACGUCTTCACCGTCCATTTTGAC |
| | USER | [SEQ ID NO: 184] |
| 891 | pTD6, USER | ACAGATTAAAGGTTGACCAGTAU [SEQ ID NO: 185] |
| 892 | pTD6, USER | ACCAATTCTGTGTTGCGCAU [SEQ ID NO: 186] |
| 893 | SP-dar-bdh, | ATGCGCAACACAGAATTGGUGGCCNNNNNAGTTTATTCTTGAC |
| | fwd. | ANNNNNNNNNNNNNNTGRTATAATNNNNAAGTAATAAAATAT |
| | | TCGGAGGAAT [SEQ ID NO: 187] |
| 894 | adhB rev., | ATACTGGTCAACCTTTAATCTGUTTAAAATGCTGATAAAAACA |
| | USER | ATTCTT [SEQ ID NO: 188] |
| 920 | pCS1966, | ATAAGCTUGATATCGAATTCCT [SEQ ID NO: 189] |
| | USER | |
| 921 | pCS1966, | ATTCCCTTUAGTGAGGGTTAAT [SEQ ID NO: 190] |
| | USER | |
| 926 | ldh rev, XhoI | TCGACCTCGAGTTTTTTATTTTTAGTTTTTAACTGCAG [SEQ ID |
| | | NO: 191] |
| 927 | adhE ups., | ATGTGTACGUTCTCCTTTGTG [SEQ ID NO: 192] |
| | USER | |
| 928 | adhE dwn., | ACGTACACAUATTATAGTATTTGGAACCGAAC [SEQ ID NO: |
| | USER | 193] |
| 929 | adhE ups., | AAGCTTAUGGTCGTCTTGTTACTTGTG [SEQ ID NO: 194] |
| | USER | |
| 930 | adhE dwn., | AAAGGGAAUTCTGCCGGAGCTATATATG [SEQ ID NO: 195] |
| | USER | |
| 975 | dar-bdh rev. | TTAATTATACAACATTCCTCCATC [SEQ ID NO: 196] |
| 976 | butBA ups., | AATTCCTGCAGATCTATACCTACTTGACCAGC [SEQ ID NO: 197] |
| | PstI | |
| 977 | butBA ups., | TAGTGGATCCGAGTATTCGCAAACCTTCAG [SEQ ID NO: 198] |
| | BamHI | |
| 978 | butBA dwn., | AATTCCTGCAGAATAAATGAATGAGGTAAGGTCTA [SEQ ID |
| | PstI | NO: 199] |
| 979 | butBA dwn., | GACCTCGAGTTTAAGAGATAAAAGGTTAATTGTG [SEQ ID NO: |
| | XhoI | 200] |
| 991 | gusA | GAATCGGTACCAATAAAATATTCGGAGGAATTTTGAAATGTTA |
| | MG1655 | CGTCCTGTAGAAAC [SEQ ID NO: 201] |
| 992 | gusA | GGACCGTACGTTAAAAAATAAAAAAGAACCCACTCGGGTTCTT |
| | MG1655 | TTTTTTATTGTTTGCCTCCCTGCTG [SEQ ID NO: 202] |
| 1057 | aldB ups., | TAGTGGATCCCTTAATTGCTGGAATCACTG [SEQ ID NO: 203] |
| | BamHI | |
| 1058 | aldB ups., | AATTCCTGCAGATGATATTTCTCTTTTCTATCTCA [SEQ ID NO: |
| | PstI | 204] |
| 1059 | aldB dwn., | AATTCCTGCAGAATTGCTTAAATTTCTTTAGCTAC [SEQ ID NO: |
| | PstI | 205] |
| 1060 | aldB dwn., | TCGACCTCGAGTTAGACGCTCGGGATAAAG [SEQ ID NO: 206] |
| | XhoI | |
| 1112 | pCI372 | GCAACAACGTGCGCAAAC [SEQ ID NO: 207] |
| 1113 | pCI372 | CTGCAGGTCGACTCTAG [SEQ ID NO: 208] |
| 1117 | aldB fwd. | AATATTTTAGGACCCAATGATG [SEQ ID NO: 209] |
| 1119 | aldB rev | CGAGCTGGAAAGCTTTTATC [SEQ ID NO: 210] |
| 1130 | SP-IdhA E. | CTAGTCTAGAGCNNAGTTTATTCTTGACANNNNNNNNNN |
| | coli, XbaI | NNNNTGRTATAATNNNNAAGTAATAAAATATTCGGAGGAATT |
| | | TTGAAATGAAACTCGCCGTTTATAG [SEQ ID NO: 211] |
| 1131 | ldhA rev, | TCGACCTCGAGAAGAATAGAGGATGAAAGGTC [SEQ ID NO: |
| | XhoI | 212] |

### 1.5 Properties of the Genetically Engineered Strain

[0106] A strain of Lactococcus lactis subsp. cremoris from which the lactate dehydrogenases (Idh, IdhB, IdhX), phosphotransacetylase (pta), and alcohol dehydrogenase (adhE) have been inactivated by deletion of their genes is only able to grow aerobically. The main fermentation products of this strain are D-acetoin, diacetyl and pyruvate. The formation of 2,3-butanediol from diacetyl consumes the two NADH formed in glycolysis. In order to obtain a high yield of 2,3-butanediol, it is essential to eliminate alternative NADH consuming reactions. Aerobic growth conditions are needed for the non-enzymatic conversion of α-acetolactate into diacetyl, but unfortunately if oxygen is present NADH oxidase activity consumes a large proportion of the NADH. The main source of NADH oxidase activity in L. lactis can be attributed to NoxE (>95%), which is a water-forming NADH oxidase. The noxE gene was there for deleted in the final strain, CS4701. In addition, the α-acetolactate decarboxylase gene (aldB) and butBA operon were deleted to avoid formation of D-acetoin, which can only be converted into meso- or (R,R)-2,3-butanediol, and interference from the native butanediol dehydrogenases. To enable conversion of diacetyl into (S,S)-2,3-butanediol two 2,3-butanediol dehydrogenases were expressed as an operon from synthetic promoters in a plasmid (pCS4634): ButC from Klebsiella pneumonia which has a high specific activity towards diacetyl and an L-butanediol dehydrogenase from Brevibacterium saccharolyticum. When the chromosomally encoded lactate dehydrogenases and phosphotransacetylase were inactivated the result was a large decline in the specific growth rate and this reduced transformation efficiency and thereby the succeeding manipulations. For this reason we introduced plasmids with a thermosensitive replicon expressing lactate dehydrogenase activity. These plasmids also allowed for efficient regeneration of NAD+and thereby anaerobic growth and were removed in the final strain CS4701. Strain CS4701 (MG1363 ΔIdh ΔIdhX ΔIdhB Δpta ΔadhE ΔbutBA ΔaldB ΔnoxE pCS4634) was found to be unable to grow unless acetoin or hemin was added to the medium.

[0107] Product formation for strain CS4701 depends on hemin concentration. In principle strain CS4701 should be able to grow and produce (S,S)-2,3-butanediol as the sole fermentation product. This was however not found to be the case and the strain was only able to grow in the presence of hemin, which restores respiration in L. lactis. First CS4701 was grown in M17 medium with 2% glucose and 5 μg/ml hemin but HPLC analysis of the fermentation only revealed small amounts of (S,S)-2,3-butanediol (FIG. 2A). By decreasing the amount of hemin added, however, increasing amounts of (S,S)-2,3-butanediol was formed (FIG. 2B-D). In addition to diacetyl, L-acetoin and (S,S)-2,3-butanediol large amounts of pyruvate were found in the fermentation broth (Table 3).

### Example 2 Production of Stereo-Specific S,S-2,3b

[0108] The strain CS4701 derived from Lactococcus lactis subsp. cremoris was grown in M17 medium (supplied by Oxoid; Terzaghi & Sandine, 1975) supplemented with 2% glucose as carbon source, under aerobic conditions at 30° C. In theory, although strain CS4701 was expected to grow and produce (S,S)-2,3-butanediol as the sole fermentation product under these conditions, this was not found to be the case. However, growth could be restored by cultivation in the presence of hemin, which was found to restore respiration in L. lactis. Cultures were grown for 4 days (repeated 2 times) in the presence of different amounts of hemin, where product formation was found to depend on hemin concentration. When strain CS4701 was grown in M17 medium with 2% glucose and 5 μg/ml hemin only revealed small amounts of (S,S)-2,3-butanediol were detected by HPLC analysis of the fermentation (FIG. 2A). By decreasing the amount of hemin added, however, increasing amounts of (S,S)-2,3-butanediol was formed (FIG. 2 B-D). In addition to diacetyl, acetoin and 2,3-butanediol large amounts of pyruvate were found in the fermentation broth (Table 3).

TABLE 3

| | Glu- | Pyru- | Dia- | Ace- | S,S- | Yield | Total |
|---|---|---|---|---|---|---|---|
| | cose | vate | cetyl | toin | BDO | (mol/mol | (glucose |
| | (mM) | (mM) | (mM) | (mM) | (mM) | glucose) | eq) |
| 5 μg/ml | 16.4 | 37.2 | 16.5 | 44.8 | 1.8 | 0.02 | 100 |
| hemin | | | | | | | |
| 1 μg/ml | 40.5 | 60.4 | 5.7 | 11.1 | 6.3 | 0.11 | 100 |
| hemin | | | | | | | |
| 0.5 μg/ml | 42.7 | 58.1 | 5.3 | 6.1 | 7.2 | 0.13 | 100 |
| hemin | | | | | | | |
| 0.1 μg/ml | 24.0 | 44.8 | 6.4 | 9.3 | 13.6 | 0.18 | 100 |
| hemin | | | | | | | |

HPLC was used to determine product composition, using a HPLC column HPX-87H, as described by the manufacturer (http://info.bio-ad.com/rs/bioradlaboratoriesinc/images/Bulletin_6333_Aminex%20HPLC.pdf).

### Example 3 Genetically Modified Lactococcus lactis Strain Comprising a Diacetyl Insensitive L-butanediol Dehydrogenase for Production of S, S-2,3-butanediol

[0109] The genetic modifications required to produce a Lactococcus lactis strain that is capable of producing (S,S)-2,3-butanediol from diacetyl and to efficiently direct the flux towards this compound include a set of genetic modifications that result in the inactivation of one or more alternative product pathways, as described in Example 1. Further genetic modification to produce a strain that is capable of producing S,S-2,3-butanediol with high efficiency, is described below.

### 3.1 Introducing Codon-Optimized Butanediol Dehydrogenase (bdh) into a Diacetyl-Producing Lactococcus lactis subsp. cremoris Strain

[0110] A synthetic gene [SEQ ID No. 217] encoding a diacetyl-insensitive L-butanediol dehydrogenase (EC 1.1.1.76) [SEQ ID No. 218] was cloned and expressed in the deletion strain CS4616m (MG1363 Δ³Idh Δpta ΔadhE ΔbutBA ΔaldB ΔnoxE), derived from the plasmid-free parent strain Lactococcus lactis subsp. cremoris MG1363 (Gasson, 1983). The expressed butanediol dehydrogenase corresponds to the butanediol dehydrogenase from Enterobacter cloacae having Acc. no. JN035909. The synthetic gene, codon-optimized for expression in L. lactis, was first cloned into the plasmid pTD6 (Solem et al., 2013) and operably linked to a high strength promoter having the nucleotide sequence: ATAGATTAGTTTATTCTTGACACTACAAGCTAAATGTGGTATAATCCCATAGAAGGT [SEQ ID No. 225] (Jensen et al., 1998), resulting in the plasmid pJM001. The plasmid pJM001 was transformed into deletion strain CS4616m thereby yielding the final strain CS4701m (MG1363 Δ³Idh Δpta ΔadhE ΔbutBA ΔaldB ΔnoxE pJM001).

### 3.2 Production of Stereo-Specific S,S-2,3-butanediol

[0111] CS4701m was grown in 500 ml conical flasks with 50 ml M17 broth supplemented with glucose at 30° C. and 200 rpm under aerobic conditions. Samples were collected periodically for determining cell density, glucose, α-acetolactate, acetoin and butanediol isomer concentrations. Growth of strain CS4701m was found to be dependent on a supply of hemin. However, in the absence of hemin, growth could be restored by the addition of Fe³⁺ in the beginning of growth phase, detected as an increase in cell density of the culture after 24 h cultivation, measured as OD_{600 nm} (Table 4).

TABLE 4
S-BDO production under different concentrations of Fe³⁺

| | | | | | | Yield (mol |
|---|---|---|---|---|---|---|
| | | Initial | Con- | Ace- | | S-BDO/mol |
| Fe³⁺ | | Glu | sumed | toin | S-BDO | consumed |
| (mM) | OD₆₀₀ | (mM) | Glu¹ | (mM) | (mM) | glucose) |
| 0 | 0.2 | 45.00 | 0.08 | ND | 1.72 | 0.45 |
| 3 | 1.71 | 45.00 | 1.00 | 4.76 | 25.84 | 0.57 |
| 5 | 2.01 | 45.00 | 1.00 | 4.08 | 28.05 | 0.62 |
| 8 | 1.86 | 45.00 | 0.98 | 1.88 | 32.90 | 0.74 |
| 10 | 1.61 | 45.00 | 0.93 | ND | 37.39 | 0.89 |
| 15 | 1.61 | 45.00 | 0.77 | ND | 30.40 | 0.87 |
| 20 | 1.26 | 45.00 | 0.61 | ND | 24.65 | 0.89 |
| 30 | 0.67 | 45.00 | 0.20 | ND | 5.73 | 0.63 |

¹consumed glucose percentage:
ND: Not detectable

TABLE 5
S-BDO production under different concentrations of Fe³⁺

| | | | | | Yield (mol |
|---|---|---|---|---|---|
| | Initial | Con- | Ace- | | S-BDO/mol |
| Fe³⁺ | Glu | sumed | toin | S-BDO | consumed |
| (mM) | (mM) | Glu¹ | (mM) | (mM) | glucose) |
| 0 | 95.00 | 0.04 | 0.00 | 1.42 | 0.43 |
| 5 | 95.00 | 0.89 | 2.27 | 74.00 | 0.8 |
| 10 | 95.00 | 0.91 | 3.40 | 70.61 | 0.81 |
| 15 | 95.00 | 0.53 | 2.05 | 43.58 | 0.87 |
| 20 | 95.00 | 0.41 | 3.40 | 35.00 | 0.89 |
| 30 | 95.00 | 0.19 | 1.80 | 11.11 | 0.61 |

¹consumed glucose percentage

[0112] When cells of the strain were grown in the presence of 10 mM Fe³⁺ and glucose at an initial concentration of 45 mM, the levels of S,S-2,3-butanediol (S-BDO) produced by the cells reached a maximum of 37.4 mM S-BDO (3.4 g/I) after 24 h fermentation. The calculated S-BDO yield was 0.89 mol/mol glucose (corresponding to 89% of the maximum theoretical yield). When the initial glucose concentration was set to 95 mM (Table 5), the S-BDO titer increased to 74 mM (6.7 g/l) with a S-BDO yield of 0.8 mol/mol glucose (corresponding to 80% of maximum theoretical yield). The optimal Fe³⁺ concentration supporting S-BDO lay within a range; where concentrations of ≧30mM were less advantageous for S-BDO formation. The butanediol formed by the cells was enantiomerically pure S-BDO (FIG. 3). As seen in FIG. 4, the reductive synthesis of S-BDO serves to recycle the NADH produced by glycolysis and thereby maintains a balanced ratio of the cofactors NAD⁺ and NADH. Fe³⁺, provided in the growth medium, plays an essential role in facilitating co-factor recycling between glycolysis and S-BDO production in the cells, by catalyzing the conversion of α-acetolactate synthase (ALS) into diacetyl by non-enzymatic oxidative decarboxylation, which is one of the rate-limiting steps in diacetyl formation.

### REFERENCES

[0113] 1. Gasson, M J. 1983. Plasmid complements of Streptococcus lactis NCDO 712 and other lactic streptococci after protoplast-induced curing. J. Bacteriol. 154:1-9
[0114] 2. Hayes, F., Daly, C., and G. F. Fitzgerald. 1990. Identification of the Minimal Replicon of Lactococcus lactis subsp. lactis UC317 Plasmid pCI305. Appl. Environ Microbiol. 56:202-209
[0115] 3. Holo H, Nes I F. 1989. High-frequency transformation, by electroporation, of Lactococcus lactis subsp. cremoris grown with glycine in osmotically stabilized media. Appl. Environ. Microbiol. 55:3119-3123
[0116] 4. Maguin, E., Prevost, H., Ehrlich, S. D. and Gruss, A. (1996) Efficient insertional mutagenesis in lactococci and other Gram-positive bacteria. J Bacteriol 178, 931-935.
[0117] 5. Nørholm M H H. 2010. A mutant Pfu DNA polymerase designed for advanced uracil-excision DNA engineering. BMC Biotechnol. 10:21
[0118] 6. Sambrook, J. E. F. Fritsch, and Maniatis. 1989. Molecular cloning: a laboratory manual, 2^{nd} ed. Cold Spring Harbor Laboratory Press, Cold Spring Harbor, N. Y.
[0119] 7. Solem C, Defoor E, Jensen P R, Martinussen J. 2008. Plasmid pCS1966, a new selection/counterselection tool for lactic acid bacterium strain construction based on the oroP gene, encoding an orotate transporter from Lactococcus lactis. Appl. Environ. Microbiol. 74:4772-4775
[0120] 8. Terzaghi B E, Sandine W E. 1975. Improved medium for lactic streptococci and their bacteriophages. Appl. Microbiol. 29:807-813
[0121] 9. Solem, C., Dehli, T. & Jensen, P. R. Rewiring Lactococcus lactis for ethanol production. Appl. Environ. Microbiol. 79, 2512-2518 (2013).
[0122] 10. Jensen, P. R. & Hammer, K. The sequence of spacers between the consensus sequences modulates the strength of prokaryotic promoters. Appl. Environ. Microbiol. 64:82-87 (1998).

1. A genetically modified lactic acid bacterium for production of S,S-2,3-butanediol, wherein said microorganism comprises one or more transgene encoding one or more polypeptide, wherein the one or more polypeptide has an enzymatic activity of:
a. a diacetyl reductase (E.C. 1.1.1.304) and
b. a L-butanediol dehydrogenase (E.C. 1.1.1.76) and wherein the genome of said lactic acid bacterium is deleted for genes or lacks genes encoding polypeptides having an enzymatic activity of:
c. lactate dehydrogenase (E.C1.1.1.27 or E.C.1.1.1.28)
d. α-acetolactate decarboxylase (E.C4.1.1.5)
e. diacetyl reductase (E.C.1.1.1.303)
f. butanediol dehydrogenase (E.C. 1.1.1.4)
g. acetoin reductase (EC: 1.1.1.5) and
h. NADH oxidase (E.C. 1.6.3.4).

2. A genetically modified lactic acid bacterium according to claim 1, wherein the genome of said lactic acid bacterium is additionally deleted for genes encoding polypeptides having an enzymatic activity of:
i. phosphotransacetylase (E.C.2.3.1.8) and
j. alcohol dehydrogenase (E.C. 1.2.1.10).

3. A genetically modified lactic acid bacterium according to claim 1, wherein the lactic acid bacteria belongs to a genus selected from the group consisting of Lactococcus, Lactobacillus, Pediococcus, Leuconostoc, Streptococcus, Oenococcus, and Bacillus.

4. A genetically modified lactic acid bacterium according to claim 1, wherein said microorganism comprises one transgene encoding one polypeptide, wherein the one polypeptide has an enzymatic activity of a diacetyl reductase (E.C.1.1.1.304) and a L-butanediol dehydrogenase (E.C. 1.1.1.76) and is capable of converting diacetyl to S,S-2,3-butanediol.

5. A genetically modified lactic acid bacterium according to claim 4, wherein the amino acid sequence of the polypeptide capable of converting diacetyl to S,S-2,3-butanediol has 80% to 100% sequence identity to an amino acid sequence selected from among SEQ ID NO:
218, 220, 222, and 224.

6. A genetically modified lactic acid bacterium according to claim 1, wherein said microorganism comprises one transgene encoding one polypeptide having an enzymatic activity of a diacetyl reductase (E.C. 1.1.1.304) and one transgene encoding one polypeptide having an enzymatic activity of a L-butanediol dehydrogenase (E.C. 1.1.1.76).

7. A genetically modified lactic acid bacterium according to claim 1, wherein the amino acid sequence of the polypeptide having diacetyl reductase (E.C.1.1.1.304) activity has at least 80% sequence identity to an amino acid sequence selected from among SEQ ID NO: 2, 4, 6, 8 and 10.

8. A genetically modified lactic acid bacterium according to claim 1, wherein the amino acid sequence of the polypeptide having L-butanediol dehydrogenase activity (E.C. 1.1.1.76) has at least 80% sequence identity to an amino acid sequence selected from among SEQ ID NO: 12, 14 and 16.

9. A genetically modified lactic acid bacterium according to claim 1, wherein the amino acid sequence of the polypeptide having lactate dehydrogenase activity has at least 80% sequence identity to an amino acid sequence selected from among SEQ ID NO: 18, 20, 22, 24, 26, 28, 30, 32, 34, 36, 38, 40, 42, 44, 46, 48, 50 and

52.

10. A genetically modified lactic acid bacterium according to claim 1, wherein the amino acid sequence of the polypeptide having phosphotransacetylase activity has at least 80% sequence identity to an amino acid sequence selected from among SEQ ID NO: 58, 60, 62, 64, 66, 68, 70, 72, 74 and 76, and wherein the amino acid sequence of the polypeptide having alcohol dehydrogenase activity has at least 80% sequence identity to an amino acid sequence selected from among SEQ ID NO: 78, 80, 82, 84, 86, 88, 90, 92 and 94.

11. A genetically modified lactic acid bacterium according to claim 1, wherein the amino acid sequence of the polypeptide having α-acetolactate decarboxylase activity has at least 80% sequence identity to an amino acid sequence selected from among SEQ ID NO: 96, 98, 100, 102, 104, 106, 108, 110 and 112.

12. A genetically modified lactic acid bacterium according to claim 1, wherein the amino acid sequence of the polypeptide having diacetyl reductase (E.C. 1.1.1.303) activity has at least 80% sequence identity to SEQ ID NO: 114.

13. A genetically modified lactic acid bacterium according to claim 1, wherein the amino acid sequence of the polypeptide having acetoin reductase activity has at least 80% sequence identity to SEQ ID NO: 116, 118, 120, 122 124, 126 and 128, and wherein the amino acid sequence of the polypeptide having butanediol dehydrogenase (E.C. 1.1.1.4) activity has at least 80% sequence identity to SEQ ID NO: 130.

14. A genetically modified lactic acid bacterium according to claim 1, wherein the amino acid sequence of the polypeptide having a NADH oxidase activity has at least 80% sequence identity to an amino acid sequence selected from among SEQ ID NO: 132, 134, 136, 138, 140, 142, 144, 146, 148, 150 and 152.

15. A method for the production of S,S-2,3-butanediol, comprising the steps of:
a. introducing a genetically modified lactic acid bacterium according to claim 1 into a growth medium to produce a culture,
b. providing a source of protoporphyrin IX or iron-containing porphyrin, or providing a source of Fe³⁺ ions;
c. providing aerobic culture conditions,
d. recovering S,S-2,3-butanediol produced by said culture, and optionally
e. isolating the recovered S,S-2,3-butanediol.

16. A method for the production of S,S-2,3-butanediol according to claim 15, wherein the source of iron-containing porphyrin is hemin or hematin.

17. A method for the production of S,S-2,3-butanediol according to claim 15, wherein the concentration of hemin is 0.1-5 μg/ml growth medium.

18. A method for the production of S,S-2,3-butanediol according to claim 15, wherein the Fe³⁺ ion concentration of the growth medium is at least 2 mM; and wherein a source of protoporphyrin IX or iron-containing porphyrin is excluded.

19. Use of a genetically modified lactic acid bacterium according to claim 1 for production of acetoin and S,S-2,3-butanediol.

The application's sequence listing, which the Patent Office published only in electronic form, follows.

SEQUENCE LISTING (225 sequences)

SEQ ID NO: 1 - DNA, 771 bp, Klebsiella pneumoniae
  CDS (1)..(768): Klebsiella pneumonia BudC gene encoding diacetyl reductase
atgaaaaaagtcgcacttgttaccggcgccggccaggggattggtaaagctatcgcccttcgtctggtgaaggatggatttgccgtggccattgccgattataacgacgccaccgccaaagcggtcgcctccgaaatcaaccaggccggcggccgcgccatggcggtgaaagtggatgtttctgaccgcgaccaggtatttgccgccgtcgaacaggcgcgcaaaacgctgggcggcttcgacgtcatcgtcaacaacgccggcgtggcgccgtccacgccgatcgagtccattaccccggagattgtcgacaaagtctacaacatcaacgtcaaaggggtgatctggggcatccaggcggcggtcgaggcctttaagaaagagggtcacggcgggaaaatcatcaacgcctgttcccaggccggccacgtcggtaacccggagctggcggtgtatagctcgagtaaattcgccgtacgcggcttaacccagaccgccgctcgcgacctcgcgccgctgggcatcacggtcaacggctactgcccggggattgtcaaaacgccaatgtgggccgaaattgaccgccaggtgtccgaagccgccggtaaaccgctgggctacggtaccgccgagttcgccaaacgcatcactctcggtcgtctgtccgagccggaagatgtcgccgcctgcgtctcctatcttgccagcccggattctgattacatgaccggtcagtcgttgctgatcgacggcgggatggtatttaactaa

SEQ ID NO: 2 - protein, 256 aa, Klebsiella pneumoniae
MKKVALVTGAGQGIGKAIALRLVKDGFAVAIADYNDATAKAVASEINQAGGRAMAVKVDVSDRDQVFAAVEQARKTLGGFDVIVNNAGVAPSTPIESITPEIVDKVYNINVKGVIWGIQAAVEAFKKEGHGGKIINACSQAGHVGNPELAVYSSSKFAVRGLTQTAARDLAPLGITVNGYCPGIVKTPMWAEIDRQVSEAAGKPLGYGTAEFAKRITLGRLSEPEDVAACVSYLASPDSDYMTGQSLLIDGGMVFN

SEQ ID NO: 3 - DNA, 771 bp, Enterobacter aerogenes
  CDS (1)..(768): Enterobacter aerogenes KCTC 2190 DAR gene encoding diacetyl reductase
atgaaaaaagtcgcacttgtcaccggcgccggtcagggcattggtaaagctatcgcgttacgcctcgtgaaggacggttttgccgtggcgatcgccgattacaatgacgtcacagcgaaagccgtggcggatgaaatcaaccagcacggcggccgggcaatcgcggtcaaagtcgatgtttccgaccgtgagcaggtgtttgccgccgtcgaacaggcgcgaaaaacgctgggcggattcaacgtcatcgtcaataacgccggggtcgcgccatcaacgcctatcgaatccattacgccggagattgtcgacaaggtctacaacatcaacgttaaaggggtgatctgggggattcaggcggcagtcgaggcctttaaaaaagaggggcacggcggcaaaatcatcaacgcctgttcgcaggccggacacgtcggcaacccggaactggcggtctacagctcgagcaaattcgccgtacgcggtttaacgcaaaccgccgctcgcgacctggcgccgctgggtattaccgttaacggctactgcccggggattgtgaaaacgccgatgtgggccgagatcgatcgtcaggtatccgaagcggcgggtaaacctctgggctacgggacagccgaattcgccaaacgcatcaccctcggccgcctgtctgagccagaagatgtcgccgcctgcgtctcttatctcgccagcccggattccgattatatgaccggtcaatcgctgctgatcgatggcgggatggtattcaattaa

SEQ ID NO: 4 - protein, 256 aa, Enterobacter aerogenes
MKKVALVTGAGQGIGKAIALRLVKDGFAVAIADYNDVTAKAVADEINQHGGRAIAVKVDVSDREQVFAAVEQARKTLGGFNVIVNNAGVAPSTPIESITPEIVDKVYNINVKGVIWGIQAAVEAFKKEGHGGKIINACSQAGHVGNPELAVYSSSKFAVRGLTQTAARDLAPLGITVNGYCPGIVKTPMWAEIDRQVSEAAGKPLGYGTAEFAKRITLGRLSEPEDVAACVSYLASPDSDYMTGQSLLIDGGMVFN

SEQ ID NO: 5 - DNA, 774 bp, Serratia sp.
  CDS (1)..(771): Serratia sp. ATCC 39006 DAR gene encoding diacetyl reductase
atgggaaataaagttgcattagtcactggcgcgggtcaggggattggtaaagccatcgcattgcgtcttgccaaagagggtttttccgttgccgtggttgattacaacgcggaaacagcaaaacaagtcgcccaacaaatagtagcaatgggcagtaaagctattgccttaacagcggatgtctccgatcgcgatcaggtcttctctgccgtcgataacgccaggcaacaactaggcgggttcgatgtgatcgtcaataatgcgggtatcgcccccactacacccattgaggacatcacgccagaaatcgtggacaaagtgtacaacatcaacgttaaaggcgtgatctggggtattcaagctgccgtacacgcttttaaaaccctgggacacggcgggaagatcatcaacgccagctcacaagccgggcatgtcggcaaccccgaactggcggtatacagctccagtaaattcgccgttcgtggcctaacgcagaccgccgcacgagatctggcgccactgggtattaccgttaacgcctactgcccaggcattgtcaaaacgccaatgtgggaaagcattgaccggcagatttctgaggcagccgggaagccactgggttatggcaccgaggaatttgccaaacgcatcacgctgggacgcttgtcagaaccggaggacgtcgcggcctgcgtggcttatctggctggcccggattcagattatatgaccggacaagcactgctgattgatggtggtatggtatttaattaa

SEQ ID NO: 6 - protein, 257 aa, Serratia sp.
MGNKVALVTGAGQGIGKAIALRLAKEGFSVAVVDYNAETAKQVAQQIVAMGSKAIALTADVSDRDQVFSAVDNARQQLGGFDVIVNNAGIAPTTPIEDITPEIVDKVYNINVKGVIWGIQAAVHAFKTLGHGGKIINASSQAGHVGNPELAVYSSSKFAVRGLTQTAARDLAPLGITVNAYCPGIVKTPMWESIDRQISEAAGKPLGYGTEEFAKRITLGRLSEPEDVAACVAYLAGPDSDYMTGQALLIDGGMVFN

SEQ ID NO: 7 - DNA, 771 bp, Pluralibacter gergoviae
  CDS (1)..(768): Pluralibacter gergoviae strain FB2 DAR gene encoding diacetyl reductase
atgcaaaaggtagcattcgtgacgggctccggtcagggcattggtaaagcgattgcgctgcgcctggcaaaagacggttttgcggtggccatcgccgattacaacatcaatacggccgaagacgttgctcaggaaattaacagcagcggcggcaaggcgctggcgatcaaagtggatgtctccagccgcgatcaggtgtttgcagcggttgagaaaacccgcgccaccttcggcgacttcaacgttatcgtcaacaatgcgggcgtcgcgccctccacgccgattgaatcgatcaccgaagaggttatcgacaaggtttacaacatcaacgtcaaaggcgttatctggggcatccaggccgccatcgacgcgttcaaaaaagccggccacggcggcaaaatcatcaacgcctgctctcaggcgggccacaccggcaacccggagctggcggtctacagctccagtaaattcgccgtgcgcggcctgacccagaccgccgcccgcgatctggcaccgctgggcattaccgtcaacgcctactgcccgggcatcgtcaaaaccccgatgtgggacgaaatcgaccgccaggtctccgaagccgccggcaaaccgctgggctacggcaccgagcagtttgcgaaaaaaatcactctcggccgcctctccgagccggaagacgttgctgcctgcgtctcctacctcgctggcccggactccgactatatgaccggccagtccctgctgatcgacggcggtatggtgtttaactga

SEQ ID NO: 8 - protein, 256 aa, Pluralibacter gergoviae
MQKVAFVTGSGQGIGKAIALRLAKDGFAVAIADYNINTAEDVAQEINSSGGKALAIKVDVSSRDQVFAAVEKTRATFGDFNVIVNNAGVAPSTPIESITEEVIDKVYNINVKGVIWGIQAAIDAFKKAGHGGKIINACSQAGHTGNPELAVYSSSKFAVRGLTQTAARDLAPLGITVNAYCPGIVKTPMWDEIDRQVSEAAGKPLGYGTEQFAKKITLGRLSEPEDVAACVSYLAGPDSDYMTGQSLLIDGGMVFN

SEQ ID NO: 9 - DNA, 771 bp, Kosakonia sacchari
  CDS (1)..(768): Kosakonia sacchari SP1 DAR gene encoding diacetyl reductase
atgaaaaaagttgcattcgtgaccggtgccggtcagggcattggtaaagccattgcgttgcgtctggcgaaagatggctttgccgtcgctgttgccgattacaacgccgcaacggcaaaagcggtggccgacgaaattaatcacaacaatggcagcgcgattgcggtgacggtggatgtttctgaccgcgacaaagtgtttgccgcggtagaggaggccagaaccaagctgaacggtttcgacgtgattgtgaataacgctggtgttgcgccttcaacaccgattgagtccatcacgccggaagtggtggataaggtttataacatcaacgtaaaaggcgtgatttggggcatccaggcggcggtaaaagccttcaaagcggaaaaacacggcggcaaaattatcaacgcctgttcacaagcggggcatgtcggtaacccggaactggccgtgtacagttccagtaagtttgccgtgcggggactcacgcaaaccgccgcgcgggatctcgcgccgcttggcattaccgttaatggctactgccctggcatcgtgaaaactcccatgtgggcagagattgaccgccaggtttcggaagcggccggtaaaccgctggggtatggcacgcaggagtttgctaaacgcattacgcttgggcgtctttcggaacctgaagacgttgccgcctgcgtctcttacctcgcagggccggattccgactatatgaccggccaatcattgctgatcgatggtgggatggtctttaactaa

SEQ ID NO: 10 - protein, 256 aa, Kosakonia sacchari
MKKVAFVTGAGQGIGKAIALRLAKDGFAVAVADYNAATAKAVADEINHNNGSAIAVTVDVSDRDKVFAAVEEARTKLNGFDVIVNNAGVAPSTPIESITPEVVDKVYNINVKGVIWGIQAAVKAFKAEKHGGKIINACSQAGHVGNPELAVYSSSKFAVRGLTQTAARDLAPLGITVNGYCPGIVKTPMWAEIDRQVSEAAGKPLGYGTQEFAKRITLGRLSEPEDVAACVSYLAGPDSDYMTGQSLLIDGGMVFN

SEQ ID NO: 11 - DNA, 777 bp, Brevibacterium saccharolyticum
  CDS (1)..(774): Brevibacterium saccharolyticum budC gene encoding + L-2,3-butanediol dehydrogenase
atgagcaaagttgcaatggttaccggtggtgcacaaggcatcggtcgtggaatttcagagaagctggcagcagatggtttcgatattgccgtagccgacctgccacaacaggaagaacaagctgcagagaccatcaagttgattgaagctgcagatcaaaaggctgtattcgttggattagatgtcaccgataaggctaatttcgacagtgcaattgatgaggcagcagagaaacttggcggcttcgatgtgctagtaaacaacgccggcatcgcacaaattaagccacttctggaagtcaccgaagaagacctaaagcagatctactccgtgaacgtttttagcgtattttttggtattcaagcagcatcccgaaagttcgatgagcttggcgtaaaaggcaagatcatcaacgctgcatcaatcgctgctatccaaggtttcccaatcttgagcgcctactccaccaccaaattcgcggtgcgtggcctcacccaggctgctgctcaagaacttgctccgaagggccacaccgtcaacgcatacgcacctggcatcgtgggcaccggaatgtgggagcagatcgatgctgaactttccaagatcaacggcaaaccaattggtgagaacttcaaggagtactcctcctcaatcgcattgggccgaccatcagtacctgaggatgtagccggactggtttctttcttggcgtctgaaaactccaactatgtcaccgggcaggtcatgcttgtcgacggcggcatgctctacaactaa

SEQ ID NO: 12 - protein, 258 aa, Brevibacterium saccharolyticum
MSKVAMVTGGAQGIGRGISEKLAADGFDIAVADLPQQEEQAAETIKLIEAADQKAVFVGLDVTDKANFDSAIDEAAEKLGGFDVLVNNAGIAQIKPLLEVTEEDLKQIYSVNVFSVFFGIQAASRKFDELGVKGKIINAASIAAIQGFPILSAYSTTKFAVRGLTQAAAQELAPKGHTVNAYAPGIVGTGMWEQIDAELSKINGKPIGENFKEYSSSIALGRPSVPEDVAGLVSFLASENSNYVTGQVMLVDGGMLYN

SEQ ID NO: 13 - DNA, 777 bp, Corynebacterium glutamicum
  CDS (1)..(774): Corynebacterium glutamicum gene encoding + L-2,3-butanediol dehydrogenase
atgagcaaagttgcaatggttaccggtggtgcacaaggcatcggtcgtggaatttcagagaagctggcagcagatggtttcgatattgccgtagccgacctgccacaacaggaagaacaagctgcagagaccatcaagttgattgaagctgcaggtcaaaaggctgtattcgttggattagatgtcaccgataaggctaatttcgacagtgcaattgatgaggcagcagagaaacttggcggcttcgatgtgctagtaaacaacgccggcatcgcacaaattaagccacttctggaagtcaccgaagaagacctaaagcagatctactccgtgaacgtttttagcgtattttttggtattcaagcagcatcccgaaagttcgatgagcttggcgtaaaaggcaagatcatcaacgctgcatcaatcgctgctatccaaggtttcccaatcttgagcgcctactccaccaccaaattcgcggttcgtggcctcacccaggctgctgcgcaagaactcgcacccaagggtcacaccgtgaatgcctacgcacctggcatcgtgggcaccggaatgtgggagcaaatcgatgccgagctttccaagatcaacggcaagccaatcggtgagaacttcaaggagtactcctcctcaatcgcattgggccgaccatcagtacctgaggatgtagccggtctggtttcgttcctggcttctgaaaactccaactacatcaccggacaggtcatgcttgtcgacggcggcatgctctacaactag

SEQ ID NO: 14 - protein, 258 aa, Corynebacterium glutamicum
MSKVAMVTGGAQGIGRGISEKLAADGFDIAVADLPQQEEQAAETIKLIEAAGQKAVFVGLDVTDKANFDSAIDEAAEKLGGFDVLVNNAGIAQIKPLLEVTEEDLKQIYSVNVFSVFFGIQAASRKFDELGVKGKIINAASIAAIQGFPILSAYSTTKFAVRGLTQAAAQELAPKGHTVNAYAPGIVGTGMWEQIDAELSKINGKPIGENFKEYSSSIALGRPSVPEDVAGLVSFLASENSNYITGQVMLVDGGMLYN

SEQ ID NO: 15 - DNA, 786 bp, Microbacterium paraoxydans
  CDS (1)..(783): Microbacterium paraoxydans gene encoding a + L-2,3-butanediol dehydrogenase
atggctattcaggataaggtcgcattggtcaccggagccgggcaggggatcgggcgcggcatcgcgcttcgtctcgccgccgacggttttgacatcgccgtcgcggacatcgagccgcagcgcgagaagggtgattcggtcgtcgccgagatcgagcagctgggccgaaaagcggtcttcgtcgctgcggacgtgtcgaagcgcgaccaggtcgttgccgctgtcgacgcagccgccgaacagctcggcgggttcgatgtgatcgtcaacaacgccggcatcgcccagatcaagcccgtactcgagatcaccgccgaagagctcgatcagatcttccggatcaacgtcgacagcgtggtctggggcatccaggcggccgcagcgaagttcgaacagctcggtcacggtggaaagatcatctccgcggcatccatcgcgtcgatccaggggttccccatcctcagcgcgtattcggcctcgaagttcgccgttcgcggcttcacccaggcggccgcgcaggagctcgctccgaagggcatcacggtgaacgcttacgcgcccggcatcgtcggcaccggcatgtgggaactcatcgacgccgagctcagcaagatcaacggcaagccactcggccagaacctcaaggaaaacgtggagggcatcgcgctcggccgcatcgagacccccgaggacgtcgcgaaggtcgtgtcgttcttcgccggccccgactcggactacgtcaccggccaggtgcttctcgtcgacggcggcatgctttacaactga

SEQ ID NO: 16 - protein, 261 aa, Microbacterium paraoxydans
MAIQDKVALVTGAGQGIGRGIALRLAADGFDIAVADIEPQREKGDSVVAEIEQLGRKAVFVAADVSKRDQVVAAVDAAAEQLGGFDVIVNNAGIAQIKPVLEITAEELDQIFRINVDSVVWGIQAAAAKFEQLGHGGKIISAASIASIQGFPILSAYSASKFAVRGFTQAAAQELAPKGITVNAYAPGIVGTGMWELIDAELSKINGKPLGQNLKENVEGIALGRIETPEDVAKVVSFFAGPDSDYVTGQVLLVDGGMLYN

SEQ ID NO: 17 - DNA, 978 bp, Lactococcus lactis
  CDS (1)..(975): Lactococcus lactis subsp. cremoris MG1363 ldh gene encoding lactate dehydrogenase
atggctgataaacaacgtaagaaagttatccttgttggtgacggtgctgtaggttcatcatacgcttttgcccttgttaaccaaggaattgcacaagaattaggtattgttgacctttttaaagaaaaaactcaaggggatgcagaagacctttctcatgccttggcatttacatcacctaaaaagatttactctgcagactactctgatgcaagcgacgctgacctcgttgtcttgacttctggtgctccacaaaaaccaggtgaaactcgtcttgaccttgttgaaaaaaatcttcgtattactaaagatgttgtaactaaaattgttgcttcaggattcaaaggaatcttcctcgttgctgctaacccagttgacatcttgacatacgcaacttggaaattctctggtttccctaaaaaccgtgttgtaggttcaggtacttcacttgatactgcacgtttccgtcaagcattggctgaaaaagttgacgttgatgctcgttcaatccacgcatacatcatgggtgaacacggtgactcagaatttgctgtttggtcacacgctaacgttgctggtgttaaattggaacaatggttccaagaaaatgactaccttaacgaagcagaaatcgttgaattgtttgagtctgtacgtgatgcagcttactcaatcatcgctaaaaaaggtgcaacattctacggtgtggctgtagcccttgctcgtattactaaagcaattcttgatgatgaacatgcagtacttcctgtatcagtattccaagatggacaatatggggtaagcgactgctaccttggtcaaccagctgtagttggtgctgaaggtgttgttaacccaattcacattccattgaacgatgctgaaatgcaaaaaatggaagcttctggagctcaattgaaagctatcatcgatgaagcttttgctaaagaagaatttgcttctgcagttaaaaactaa

SEQ ID NO: 18 - protein, 325 aa, Lactococcus lactis
MADKQRKKVILVGDGAVGSSYAFALVNQGIAQELGIVDLFKEKTQGDAEDLSHALAFTSPKKIYSADYSDASDADLVVLTSGAPQKPGETRLDLVEKNLRITKDVVTKIVASGFKGIFLVAANPVDILTYATWKFSGFPKNRVVGSGTSLDTARFRQALAEKVDVDARSIHAYIMGEHGDSEFAVWSHANVAGVKLEQWFQENDYLNEAEIVELFESVRDAAYSIIAKKGATFYGVAVALARITKAILDDEHAVLPVSVFQDGQYGVSDCYLGQPAVVGAEGVVNPIHIPLNDAEMQKMEASGAQLKAIIDEAFAKEEFASAVKN

SEQ ID NO: 19 - DNA, 972 bp, Lactobacillus acidophilus
  CDS (1)..(969): Lactobacillus acidophilus-NCFM LBA0271 gene encoding lactate dehydrogenase
atggcaagagttgaaaaacctcgtaaagttattttagttggtgacggtgctgtaggttctacctttgcattttcaatggtgcaacaaggtattgctgaagaattaggtatcattgatattgctaaggaacacgttgaaggtgacgcaatcgacttagcagatgctactccatggactttcccaaagaacatttacgcagctgactacgctgactgcaaggacgcagacttagtagttattactgctggtgctccacaaaagccaggtgaaactcgtcttgaccttgttaacaagaacttgaagattttatcatcaatcgttgaaccagttgttgaatcaggctttgaaggtatcttcttagtagttgctaacccagttgacatcttgactcacgcaacttggaagatttcaggcttccctaaggatcgcgttattggttcaggtacttcacttgatactggtcgtcttcaaaaggttatcggtaagatggaacacgttgacccacgttcagttaatgcatacatgcttggtgaacacggtgatactgaattcccagtatggagctacaacaatgttggtggcgtaaaggttagcgactgggttaaggctcacggtatggatgaatctaagcttgaagaaatccacaaggaagttgctgacatggcttacgacattatcaacaagaagggtgctactttctacggtatcggtacagcttcagcaatgatcgctaaggctatcttgaacgatgaacaccgtgtacttccactctcagttgcaatggatggtcaatacggtttacacgaccttcacattggtactcctgcagttgttggccgtaacggtcttgaacaaattattgaaatgcctttaaccgctgatgaacaagctaagatggaagcttctgctaagcaattaaaggaagttatggacaaagcctttgaagaaactggcgttaaggttcgtcaataa

SEQ ID NO: 20 - protein, 323 aa, Lactobacillus acidophilus
MARVEKPRKVILVGDGAVGSTFAFSMVQQGIAEELGIIDIAKEHVEGDAIDLADATPWTFPKNIYAADYADCKDADLVVITAGAPQKPGETRLDLVNKNLKILSSIVEPVVESGFEGIFLVVANPVDILTHATWKISGFPKDRVIGSGTSLDTGRLQKVIGKMEHVDPRSVNAYMLGEHGDTEFPVWSYNNVGGVKVSDWVKAHGMDESKLEEIHKEVADMAYDIINKKGATFYGIGTASAMIAKAILNDEHRVLPLSVAMDGQYGLHDLHIGTPAVVGRNGLEQIIEMPLTADEQAKMEASAKQLKEVMDKAFEETGVKVRQ

SEQ ID NO: 21 - DNA, 915 bp, Lactobacillus acidophilus
  CDS (1)..(912): Lactobacillus acidophilus-NCFM LBA1516 gene encoding lactate dehydrogenase
atgagaaaagtaggtataatcggaatgggtcatgtaggtgctactgtagcatatactttgtttactcatggaattgctgacgaattagttttaattgataaaaatgaagataaagttgctgctgaatataatgacttacgtgattctttatcaagaaataattactacgttcgtgtaactatgcaagattggcatgaattaaaagatgcggatattattgtaactgcttttggtgatattgcggctagtgtcaagactggcgatcgttttggtgaatttgaacttaacgctaagaatgcaaaagaagtcggtgaaaagattaagaacactggttttaagggtgtacttcttaatatctctaatccatgtgatgctgttgcacaaatcttgcaagaaactactggattaagtaagaaccaagttttaggtactggtactttcttggatactgcaagaatgcaaagaattattggtgaaaagctaggtcaagatccaaaaaatgttgaaggttgggttttgggtgaacatggttcatcacaatttatcgcttggtccactgttcgtgttaacaacaagattgctattcaattatttagcgaaaatgaacaaagaaagttaaataaggtaccaaacaagaattcatttgtggttgcaaatggaaaaggctacactagttacgcaattgctacatgtgctgtaaggcttattcaagcaatcttttctgatgctcatttatatgctcctgtatcagtatacaatccagaatacaagacttatattggctatcctgcaattattggtcgtgatggaattgaacaagtgattgaattgaaacttacttcaaatgaacgtgaaaagcttcaagcagcagctgataagatcaaggaacacttggaacaactgaagaacaagtaa

SEQ ID NO: 22 - protein, 304 aa, Lactobacillus acidophilus
MRKVGIIGMGHVGATVAYTLFTHGIADELVLIDKNEDKVAAEYNDLRDSLSRNNYYVRVTMQDWHELKDADIIVTAFGDIAASVKTGDRFGEFELNAKNAKEVGEKIKNTGFKGVLLNISNPCDAVAQILQETTGLSKNQVLGTGTFLDTARMQRIIGEKLGQDPKNVEGWVLGEHGSSQFIAWSTVRVNNKIAIQLFSENEQRKLNKVPNKNSFVVANGKGYTSYAIATCAVRLIQAIFSDAHLYAPVSVYNPEYKTYIGYPAIIGRDGIEQVIELKLTSNEREKLQAAADKIKEHLEQLKNK

SEQ ID NO: 23 - DNA, 927 bp, Lactobacillus acidophilus
  CDS (1)..(924): Lactobacillus acidophilus-NCFM LBA0910 gene encoding lactate dehydrogenase
atgagtagaaaagtgtttcttgtaggtgatggtgctgttggttcaacttttgcaaatgacttattgcaaaatacaactgttgatgaattagcgatttttgatgttgctaaagatcgtccagttggtgattcaatggatttggaagatattactccatttacaggtcaaactaatattcatccagcagaatatagtgatgctaaagatgcagatgtgtgtgtaattactgctggtgttcctcgtaaacctggtgaaactagacttgacttagttaataagaatgtaaagattttaaagactattgttgatccggttgttgaatccggttttaagggtgtatttgttgtttcagctaacccggttgatattttaaccacattgactcaaaaaatatccggttttccaaaagatcgtgtaattggtactggtacttcacttgattcaatgcgtcttcgcgttgaattggcaaagaaacttaatgttccagtagctaaggttaactcaatggttcttggtgaacacggtgatactagttttgaaaactttgacgaatcaactgttgacaataagccacttcgcgattactcagaaatcaatgataatgttttaagtgaaattgagtcagacgtccgtaaaaagggtggaaagatcatcactaacaaaggagctacattctatggtgttgctatgatgcttactcaaattgttagtgctattttagataatcgttcaatttgtttgccattatcagccccaattaatggtgaatatggcattaagcatgatctttacttaggtactccaactataattaacggtaatggtattgaaaaagttattgaaactaaactttcagatgtagaaaaagctaagatgatcaattctgcagataagatgcaagaagttttatcaggtgttgaaatgtaa

SEQ ID NO: 24 - protein, 308 aa, Lactobacillus acidophilus
MSRKVFLVGDGAVGSTFANDLLQNTTVDELAIFDVAKDRPVGDSMDLEDITPFTGQTNIHPAEYSDAKDADVCVITAGVPRKPGETRLDLVNKNVKILKTIVDPVVESGFKGVFVVSANPVDILTTLTQKISGFPKDRVIGTGTSLDSMRLRVELAKKLNVPVAKVNSMVLGEHGDTSFENFDESTVDNKPLRDYSEINDNVLSEIESDVRKKGGKIITNKGATFYGVAMMLTQIVSAILDNRSICLPLSAPINGEYGIKHDLYLGTPTIINGNGIEKVIETKLSDVEKAKMINSADKMQEVLSGVEM

SEQ ID NO: 25 - DNA, 924 bp, Lactobacillus delbrueckii
  CDS (1)..(921): Lactobacillus delbrueckii subsp. bulgaricus ATCC 11842_ Ldb0120 gene encoding lactate dehydrogenase
atgagtagaaaagtcctgctggttggcgacggtgctgtcggttccaactttgccaacgatttattgcaaacaacgcgggtggatgaactggtcatctgcgacttgaataaagaccgggccgcgggcgactgcctggacctggaagacatgacctactttacgggccagaccaagctgagagctggtgactacagcgacgcggctgacgccgacgtggtagttatcacggccggcgtgccccgcaagccaggtgaaagccggcttgacctgatcaagaagaatgaagccatcttgcggagcatcgttgatccagtcgtagcttccggcttcagcggcatcttcgtcgtttccgccaacccggttgacatcttgaccactttgacccagaagctgtccggcttcccaaagaagcgggtcatcgggaccgggacttccctggactcagctagtttgcgggtagaactggccaagcggctgcaagtgccaattgaatcagtcaacgcctgggttctgggtgaacatggcgacagcagctttgagaacttctcaagtgccgtggtcaacggcaagcccttgcttgactatccgggcatgacagaagcagccttagatgagattgaagcccacgtccgggaaaagggcagcgagattatcgtcaaaaagggcgcaacctactatggcgtggccatgatgctggccaagatcgtgacggccattttggaaaacaacgacctggccctgcctctttccgcaccattgcacggggaatacgggatcaaggatgagatctacctgggcaccctggccatcatcaacggacaagggatcagccacgtactggaattgccgttaaatgacagcgaattggccaagatgcgggcctcagccgcgacgataaaggcaaccctggactctttaggataa

SEQ ID NO: 26 - protein, 307 aa, Lactobacillus delbrueckii
MSRKVLLVGDGAVGSNFANDLLQTTRVDELVICDLNKDRAAGDCLDLEDMTYFTGQTKLRAGDYSDAADADVVVITAGVPRKPGESRLDLIKKNEAILRSIVDPVVASGFSGIFVVSANPVDILTTLTQKLSGFPKKRVIGTGTSLDSASLRVELAKRLQVPIESVNAWVLGEHGDSSFENFSSAVVNGKPLLDYPGMTEAALDEIEAHVREKGSEIIVKKGATYYGVAMMLAKIVTAILENNDLALPLSAPLHGEYGIKDEIYLGTLAIINGQGISHVLELPLNDSELAKMRASAATIKATLDSLG

SEQ ID NO: 27 - DNA, 939 bp, Lactobacillus casei
  CDS (1)..(936): Lactobacillus casei ATCC 334, LSEI_0634 gene encoding lactate dehydrogenase
atgcggaacaacggcaatattattttaattggtgatggcgcgattggatcaagttatgcgttcaactgtctcaccaccggcgtcggccagagtcttggtattattgatgttaacgaaaaacgcgtgcaaggtgacgtcgaagatctttctgatgccctaccttacacgtcacagaagaatatttatgcggccagctatgaagattgcaaatatgccgatattatcgtcatcacagccggaattgcccaaaagccaggtcagacacgcctacaacttttggccatcaacgcaaagatcatgaaagaaatcacacataacattatggcaagcgggttcaatgggtttattttagtcgcatccaatccagtcgatgtccttgccgaattagtcttgcaagaatccggcttgccacgtaatcaggtgctgggatcagggacggcgcttgattcagctcgcttacggtctgagatcggtctgcgttataacgtggacgcccggattgtgcacggctacatcatgggtgaacacggcgattctgaatttccagtttgggactacaccaacattggcggcaaaccgattcttgattggattcctaaagatcgccaggataaagatctgcctgatattagcgagcgcgtcaaaacggctgcttatggcatcattgagaaaaaaggtgccactttctacggcattgctgcctcattaacccgtttaaccagcgccttcttgaatgatgatcgcgcagcattcgcaatgtccgtccatttggaaggcgaatacggcttgtcaggtgtttccatcggtgtaccggtaatcctcggcgctaatggcttagaacgcatcattgagctggatttgaacccagaagatcataagcggttagccgattctgcagctattttgaaagaaaatctgaagaaggctcaagaagcttaa

SEQ ID NO: 28 - protein, 312 aa, Lactobacillus casei
MRNNGNIILIGDGAIGSSYAFNCLTTGVGQSLGIIDVNEKRVQGDVEDLSDALPYTSQKNIYAASYEDCKYADIIVITAGIAQKPGQTRLQLLAINAKIMKEITHNIMASGFNGFILVASNPVDVLAELVLQESGLPRNQVLGSGTALDSARLRSEIGLRYNVDARIVHGYIMGEHGDSEFPVWDYTNIGGKPILDWIPKDRQDKDLPDISERVKTAAYGIIEKKGATFYGIAASLTRLTSAFLNDDRAAFAMSVHLEGEYGLSGVSIGVPVILGANGLERIIELDLNPEDHKRLADSAAILKENLKKAQEA

SEQ ID NO: 29 - DNA, 981 bp, Lactobacillus casei
  CDS (1)..(978): Lactobacillus casei ATCC 334 _ gene LSEI_2549 encoding a lacate dehydrogenase
  tRNA (1)..(3): Met is inserted by tRNA at start codon (GTG) instead of Val
gtggcaagtattacggataaggatcaccaaaaagttattctcgttggtgacggcgccgttggttcaagttatgcctacgcaatggttttgcaaggtatcgctcaggaaatcggaatcgttgacattttcaaggacaagacaaagggtgacgcgattgacttgagcaacgcgctcccattcacaagtcctaagaagatttattcagctgaatacagcgatgctaaggatgctgatctggttgttatcacagctggcgctcctcagaagcctggcgaaactcgtttggacttggttaacaagaacttgaagatcttgaagtccattgttgacccaatcgttgattccggctttaacggtattttcttagttgctgccaacccagttgacattttgacctatgcaacttggaaactttctggcttcccgaagaaccgggttgttggttccggtacttcactggacaccgcccgcttccgtcagtccattgctgaaatggttaatgttgacgctcgttcggtccacgcttacatcatgggcgaacatggtgacactgaattccctgtatggtcccacgctaacattggtggcgttaccatcgctgaatgggttaaggctcatccagaaatcaaggaagacaagcttgttaagatgtttgaagacgttcgtgacgccgcttatgaaatcatcaaactcaagggtgcgaccttctatggtatcgcaactgcccttgcccggatttcaaaggcaatccttaacgacgaaaatgcggttctgccactttccgtttacatggatggtcaatatggcttgaacgacatctacatcggtactccagctgtgatcaaccgtaatggtatccagaacatcctggaaatcccattgaccgatcacgaagaagaatccatgcagaaatctgcttctcaattgaagaaggttctgaccgatgctttcgctaagaatgacatcgaaactcgtcagtaa

SEQ ID NO: 30 - protein, 326 aa, Lactobacillus casei
VASITDKDHQKVILVGDGAVGSSYAYAMVLQGIAQEIGIVDIFKDKTKGDAIDLSNALPFTSPKKIYSAEYSDAKDADLVVITAGAPQKPGETRLDLVNKNLKILKSIVDPIVDSGFNGIFLVAANPVDILTYATWKLSGFPKNRVVGSGTSLDTARFRQSIAEMVNVDARSVHAYIMGEHGDTEFPVWSHANIGGVTIAEWVKAHPEIKEDKLVKMFEDVRDAAYEIIKLKGATFYGIATALARISKAILNDENAVLPLSVYMDGQYGLNDIYIGTPAVINRNGIQNILEIPLTDHEEESMQKSASQLKKVLTDAFAKNDIETRQ

SEQ ID NO: 31 - DNA, 906 bp, Lactobacillus casei
  CDS (1)..(903): Lactobacillus casei ATCC 334_gene LSEI_2607 encoding lactate dehydrogenase
atggcaagaacaattggtattattggtattggacacgtaggtgtgaccacggcttttaatcttgtcagcaaaggggttgctgacaagttagtcttgattgataaaaaggctgaacttgctgaaggcgaaagctttgacttgaaggatgcgcttggcggcttgcccacttatactgacattgttgtcaacgattatgatgctttgaaagatgctgatgtggttatttccgcggtcggcaatattggcgccatttcaaatggtgatcgaattggagaaaccaagacttcaaaagtagcactagatgacgtcgctccaaaactgaaggcgtctggcttccatggcgttttgctagatatcaccaatccatgtgatgctgtcacgagttactggcaatatctcctagatttaccgaagtctcaaattattgggactgggacttcgctggatacttatcggatgcgacgggcggttgccgataccttgcatgtgaatgttgctgacgtgcgtggttacaatatgggcgaacatggcgaatcgcaatttaccgcttggtcaacagtacgggtcaataatgaaccgattgctgaatatgcgaaggttgattacgaccagcttgccgatgatgcgcgggcaggcggttggaagatttatcaggctaagcattatacgagctacggtatcgccaccatcgcgactgaaatgacacaggcgatcatcagcgatgcacatcgcatcttcccatgcgctaattacgatccagaattcggtattgctatcggtcatccagccatgatcggtaaacaaggtgttatcaagacgccaacgttgaagttgacagatgaagagcgtgctaagtatgttcactctgccggtatcattaaggatacctttgaaaaaatgaagtag

SEQ ID NO: 32 - protein, 301 aa, Lactobacillus casei
MARTIGIIGIGHVGVTTAFNLVSKGVADKLVLIDKKAELAEGESFDLKDALGGLPTYTDIVVNDYDALKDADVVISAVGNIGAISNGDRIGETKTSKVALDDVAPKLKASGFHGVLLDITNPCDAVTSYWQYLLDLPKSQIIGTGTSLDTYRMRRAVADTLHVNVADVRGYNMGEHGESQFTAWSTVRVNNEPIAEYAKVDYDQLADDARAGGWKIYQAKHYTSYGIATIATEMTQAIISDAHRIFPCANYDPEFGIAIGHPAMIGKQGVIKTPTLKLTDEERAKYVHSAGIIKDTFEKMK

SEQ ID NO: 33 - DNA, 963 bp, Lactobacillus plantarum
  CDS (1)..(963): Lactobacillus plantarum WCFS1_ gene lp_0537 encoding lactate dehydrogenase
  tRNA (1)..(3): Met is inserted by tRNA at start codon (TTG) instead of Leu
ttgtcaagcatgccaaatcatcaaaaagttgtgttagtcggcgacggcgctgttggttctagttacgcttttgccatggcacaacaaggaattgctgaagaatttgtaattgtcgatgttgttaaagatcggacaaagggtgacgcccttgatcttgaagacgcccaagcattcaccgctcccaagaagatttactcaggcgaatattcagattgtaaggacgctgacttagttgttattacagccggtgcgcctcaaaagcctggtgaatcacgtttagacttagttaacaagaatttaaatatcctatcatccattgtcaaaccagttgttgactccggctttgacggcatcttcttagttgctgctaaccctgttgacatcttaacttacgctacttggaaattctcaggtttcccaaaggatcgtgtcattggttcagggacttccttagactcttcacgtttacgcgttgcgttaggcaaacaattcaatgttgatcctcgttccgttgatgcttacatcatgggtgaacacggtgattctgaatttgctgcttactcaactgcaaccatcgggacacgtccagttcgcgatgtcgctaaggaacaaggcgtttctgacgaagatttagccaagttagaagacggtgttcgtaacaaagcttacgacatcatcaacttgaagggtgccacgttctacggtatcgggactgctttaatgcggatttccaaagccattttacgtgatgaaaatgccgttttaccagtaggtgcctacatggacggccaatacggcttaaacgacatttatatcgggactccggctgtgattggtggaactggtttgaaacaaatcatcgaatcaccactttcagctgacgaactcaagaagatgcaagattccgccgcaactttgaaaaaagtgcttaacgacggtttagctgaattagaaaataaataa

SEQ ID NO: 34 - protein, 320 aa, Lactobacillus plantarum
LSSMPNHQKVVLVGDGAVGSSYAFAMAQQGIAEEFVIVDVVKDRTKGDALDLEDAQAFTAPKKIYSGEYSDCKDADLVVITAGAPQKPGESRLDLVNKNLNILSSIVKPVVDSGFDGIFLVAANPVDILTYATWKFSGFPKDRVIGSGTSLDSSRLRVALGKQFNVDPRSVDAYIMGEHGDSEFAAYSTATIGTRPVRDVAKEQGVSDEDLAKLEDGVRNKAYDIINLKGATFYGIGTALMRISKAILRDENAVLPVGAYMDGQYGLNDIYIGTPAVIGGTGLKQIIESPLSADELKKMQDSAATLKKVLNDGLAELENK

SEQ ID NO: 35 - DNA, 930 bp, Lactobacillus plantarum
  CDS (1)..(927): Lactobacillus plantarum WCFS1; gene lp_1101 encoding lactate dehydrogenase
atggataagaagcaacgcaaagtcgtaattgttggtgatggctcggtgggttcatcatttgccttttcattggtccaaaattgcgccctagatgaactcgttatcgttgacttggttaaaacgcacgcagagggggacgttaaggatttggaagatgttgccgcctttacgaatgcgaccaacattcataccggtgaatatgcggatgcgcgtgatgctgacatcgttgtcattacggctggtgtgcctcgtaagcctggtgagagtcgtttagatttgattaaccgcaatacgaagattctggaatccatcgtcaaaccagtggttgcgagtggttttaatggttgcttcgttatctcaagtaatcccgtcgatattttgacttcgatgacgcaacgtttatccggttttccacggcatcgggtcattggtaccgggacttccttggatacggcgcggttacgggtcgccttggctcagaagttgaatgttgccaccactgcagttgatgctgcggtacttggagaacatggtgatagttccatcgttaattttgatgaaattatgatcaatgctcagcccttaaagacggtcacaacggtcgatgatcagttcaaagctgaaatcgagcaagctgttcgtggtaaaggtggtcaaatcattagtcagaagggggccacgttctatggggtcgccgttagtttgatgcaaatctgccgagcaattttgaacgatgaaaatgctgagttgattgtctccgccgctttgtctggtcaatatggcattaacgatttgtacttggggtcacccgccattattaaccgcaacgggctccaaaaagtgatcgaagctgagctatcagatgatgagcgtgcccggatgcaacatttcgcagccaagatgctgaccatgatgaatgtggcatcataa

SEQ ID NO: 36 - protein, 309 aa, Lactobacillus plantarum
MDKKQRKVVIVGDGSVGSSFAFSLVQNCALDELVIVDLVKTHAEGDVKDLEDVAAFTNATNIHTGEYADARDADIVVITAGVPRKPGESRLDLINRNTKILESIVKPVVASGFNGCFVISSNPVDILTSMTQRLSGFPRHRVIGTGTSLDTARLRVALAQKLNVATTAVDAAVLGEHGDSSIVNFDEIMINAQPLKTVTTVDDQFKAEIEQAVRGKGGQIISQKGATFYGVAVSLMQICRAILNDENAELIVSAALSGQYGINDLYLGSPAIINRNGLQKVIEAELSDDERARMQHFAAKMLTMMNVAS

SEQ ID NO: 37 - DNA, 963 bp, Pediococcus pentosaceus
  CDS (1)..(960): Pediococcus pentosaceus ATCC 25745: gene PEPE_1554 encoding lactate dehydrogenase
  tRNA (1)..(3): Met is inserted by tRNA at start codon (TTG) instead of Leu
ttgtctaaaattcaaaaccatcaaaaagttgtattagtcggcgacggcgctgtaggttcaagttatgcctttgcaatggcacaacaaggaattgcagaagaattcgtaatcgttgatgttgttaaggaccgtactgttggtgacgcacttgatcttgaagatgctactccatttactgcacctaagaacatttactcaggtgaatattctgactgtaaagatgcagatcttgtagttatcactgctggtgctccacaaaaaccaggtgaaacacgtcttgaccttgttaacaagaacttaaacattctttcaacaatcgttaagccagttgttgactcaggcttcgacggtatcttcttagttgctgctaacccagttgatatccttacttacgcaacatggaaattctcaggattccctaaagaaaaggttatcggttcaggtatttctcttgattcagcacgtctacgtgttgctcttggtaagaaattcaacgttagccctgactcagttgatgcatacatcatgggtgaacatggtgacagtgaattcgctgcttactcaactgcttcaatcggtacaaagccattgcttgatatcgctaaagaagaaggcgtttcaactgacgaattagctgaaatcgaagacagtgttcgtaacaaagcttacgaaatcatcaacaagaagggtgctacattctacggtgttggtactgctttgatgcgtatttcaaaagctatcttgcgtgacgaaaatgctgtattgcctgttggtgcttacatggacggcgaatatggtttgaatgacatctacatcggtacacctgctgttattaacggccaaggtttgaaccgtgttatcgaatcaccacttagtgatgacgaaatgaagaagatgacagattcagctacaacattgaaaaaagttcttacagatggtttgaaagctcttgaagaaaaataa

SEQ ID NO: 38 - protein, 320 aa, Pediococcus pentosaceus
LSKIQNHQKVVLVGDGAVGSSYAFAMAQQGIAEEFVIVDVVKDRTVGDALDLEDATPFTAPKNIYSGEYSDCKDADLVVITAGAPQKPGETRLDLVNKNLNILSTIVKPVVDSGFDGIFLVAANPVDILTYATWKFSGFPKEKVIGSGISLDSARLRVALGKKFNVSPDSVDAYIMGEHGDSEFAAYSTASIGTKPLLDIAKEEGVSTDELAEIEDSVRNKAYEIINKKGATFYGVGTALMRISKAILRDENAVLPVGAYMDGEYGLNDIYIGTPAVINGQGLNRVIESPLSDDEMKKMTDSATTLKKVLTDGLKALEEK

SEQ ID NO: 39 - DNA, 996 bp, Leuconostoc mesenteroides
  CDS (1)..(993): Leuconostoc mesenteroides subsp. mesenteroides ATCC 8293: gene LEUM_1756 encoding lactate dehydrogenase
atgaagatttttgcttacggcattcgtgatgatgaaaagccatcacttgaagaatggaaagcggctaacccagagattgaagtggactacacacaagaattattgacacctgaaacagctaagttggctgagggatcagattcagctgttgtttatcaacaattggactatacacgtgaaacattgacagctttagctaacgttggtgttactaacttgtcattgcgtaacgttggtacagataacattgattttgatgcagcacgtgaatttaactttaacatttcaaatgttcctgtttattcaccaaatgctattgcagaacactcaatgattcaattatctcgtttgctacgtcgcacgaaagcattggatgccaaaattgctaagcacgacttgcgttgggcaccaacaattggacgtgaaatgcgtatgcaaacagttggtgttattggtacaggtcatattggccgtgttgctattaacattttgaaaggctttggggccaaggttattgcttatgacaagtacccaaatgctgaattacaagcagaaggtttgtacgttgacacattagacgaattatatgcacaagctgatgcaatttcattgtatgttcctggtgtacctgaaaaccatcatctaatcaatgcagatgctattgctaagatgaaggatggtgtggttatcatgaacgctgcgcgtggtaatttgatggacattgacgctattattgatggtttgaattctggtaagatttcagacttcggtatggacgtttatgaaaatgaagttggcttgttcaatgaagattggtctggtaaagaattcccagatgctaagattgctgacttgattgcacgcgaaaatgtattggttacgccacacacggctttctatacaactaaagctgttctagaaatggttcaccaatcatttgatgcagcagttgctttcgccaagggtgagaagccagctattgctgttgaatattaa

SEQ ID NO: 40 - protein, 331 aa, Leuconostoc mesenteroides
MKIFAYGIRDDEKPSLEEWKAANPEIEVDYTQELLTPETAKLAEGSDSAVVYQQLDYTRETLTALANVGVTNLSLRNVGTDNIDFDAAREFNFNISNVPVYSPNAIAEHSMIQLSRLLRRTKALDAKIAKHDLRWAPTIGREMRMQTVGVIGTGHIGRVAINILKGFGAKVIAYDKYPNAELQAEGLYVDTLDELYAQADAISLYVPGVPENHHLINADAIAKMKDGVVIMNAARGNLMDIDAIIDGLNSGKISDFGMDVYENEVGLFNEDWSGKEFPDAKIADLIARENVLVTPHTAFYTTKAVLEMVHQSFDAAVAFAKGEKPAIAVEY

SEQ ID NO: 41 - DNA, 990 bp, Leuconostoc mesenteroides
  CDS (1)..(987): Leuconostoc mesenteroides subsp. mesenteroides ATCC 8293: gene LEUM_2043 encoding lactate dehydrogenase
atgaaaattttaatgtacaatacagtttcagacgaaatgccatatgttgaaaaatggactgaaaaaacaggccacgaagtagtgaccattgatcaaccacttaacgaaacgacggtggatcgcgctaaaggttttgatgcaattaccacacaacaaacaacagccattaatgcaccagtttatgcgcaactagctcaattcaatattaagcaaatcgctattcgacaggttggctatgatgtgttggacttgccagaagcctttgctcacaatattcgtttgtctaatgttgcagcctattcaccccgagcaattgcagaatacacgctaacacagctttttaatttaattcgacacaataaaaagtttgatcgcgccatgaatacgggtgactatacttgggctgctggtggtcaagcgagagaaattcatgatttaactgttgctgtgattggtgtaggtcgaattgggacagcccttgcagaaatgcttcacgcgctgggcgcaacagtgttaggtgtggacccaatatatcgtgcccagaacgaaccatttgtaacttatacgacattagatgatgctttgtctcgagcggatgttattagttttcatacaccattaaatgacgagacgcgctatatggctgatgaaaatttctttgctaaaattcagccaggaacaattatgttgaattttgcgcgtggtgaaattgttgacatggttgagcttgaaaaagcactcgaatcaaagttattggctggtgcagcatttgatgtgacaccaaatgaaaatgattttatgaaccaaaagcaagatataacggcgctaccagcagatgtaaagcgcttaatcgaatatgacaactttctactgtcaccacatattgctttttatacaaacacagcaataaaaaatatggtggaaatggctttaaatgatgccgtaacgatggtaaatggcggcgttactgaaaacgaaattttgcggtaa

SEQ ID NO: 42 - protein, 329 aa, Leuconostoc mesenteroides
MKILMYNTVSDEMPYVEKWTEKTGHEVVTIDQPLNETTVDRAKGFDAITTQQTTAINAPVYAQLAQFNIKQIAIRQVGYDVLDLPEAFAHNIRLSNVAAYSPRAIAEYTLTQLFNLIRHNKKFDRAMNTGDYTWAAGGQAREIHDLTVAVIGVGRIGTALAEMLHALGATVLGVDPIYRAQNEPFVTYTTLDDALSRADVISFHTPLNDETRYMADENFFAKIQPGTIMLNFARGEIVDMVELEKALESKLLAGAAFDVTPNENDFMNQKQDITALPADVKRLIEYDNFLLSPHIAFYTNTAIKNMVEMALNDAVTMVNGGVTENEILR

SEQ ID NO: 43 - DNA, 987 bp, Streptococcus thermophilus
  CDS (1)..(984): Streptococcus thermophilus CNRZ1066: gene str1280 encoding lactate dehydrogenase
atgactgcaactaaactacacaaaaaagtcatccttgttggtgacggtgccgtaggttcatcttacgctttcgcacttgtaaaccaaggtatcgctcaagaactaggtatcatcgaaattccacaattatttgaaaaagccgttggtgatgcgcttgaccttagccacgcacttcctttcacttcacctaaaaaaatctatgcagctaaatatgaagactgtgcggatgctgaccttgtagttatcactgctggtgctcctcaaaaaccaggtgagactcgtcttgatcttgttggtaaaaaccttgcaatcaacaaatcaatcgttactcaagttgttgaatcaggattcaacggtattttccttgtagctgctaacccagtagacgtattgacttactctacatggaagttctcaggattccctaaagaacgcgttatcggttcaggtacttcacttgactcagctcgtttccgtcaagcacttgctgaaaaacttaatgtcgatgctcgttcagttcacgcttacatcatgggtgaacacggcgactcagagtttgcggtttggtcacacgctaacatcgccggtgtaaaccttgaagagttccttaaagacaaagaaaacgttcaagaagctgaattagttgaattgttcgaaggtgttcgtgatgcagcttacacaattatcaacaaaaaaggtgctacatactacggtatcgcagtagcccttgctcgtatcactaaagctatccttgacgatgaaaatgcagtacttccattgtctgtattccaagaaggtcaatatggtgtaaacaacatctttatcggtcaacctgccattgtaggtgcacacggtatcgtacgtccagtaaacatcccattgaacgatgctgaacaacaaaagatgaaggcttctgccgatgaattgcaagctatcattgatgaagcatggaaaaaccctgaattccaagaagcttcaaaaaactaa

SEQ ID NO: 44 - protein, 328 aa, Streptococcus thermophilus
MTATKLHKKVILVGDGAVGSSYAFALVNQGIAQELGIIEIPQLFEKAVGDALDLSHALPFTSPKKIYAAKYEDCADADLVVITAGAPQKPGETRLDLVGKNLAINKSIVTQVVESGFNGIFLVAANPVDVLTYSTWKFSGFPKERVIGSGTSLDSARFRQALAEKLNVDARSVHAYIMGEHGDSEFAVWSHANIAGVNLEEFLKDKENVQEAELVELFEGVRDAAYTIINKKGATYYGIAVALARITKAILDDENAVLPLSVFQEGQYGVNNIFIGQPAIVGAHGIVRPVNIPLNDAEQQKMKASADELQAIIDEAWKNPEFQEASKN

SEQ ID NO: 45 - DNA, 960 bp, Oenococcus oeni
  CDS (1)..(957): Oenococcus oeni PSU-1: gene OEOE_0025 encoding lactate dehydrogenase
atgaaaaatgttctcatcacagcggagcttcctcaagttgcaaatagtatacttcaacaagccggcctaaatgtcgaaatttttacgggtgataaattaattacaaagaaggaattacttgataaagtcaaagataaagattttttaattacctctctatcaacagatgttgatgaagacgtaataaatgcagctccaaaattaaaattaattgcgaactttggagccggattcaataacatcgacataaatagtgctcgagcaaaagaaatatctgttacaaacactccttttgtctcgactacttcagtagccgaggtcacagcaggactaattatttccctatcgcatcgtttggttgaaggagataatttaatgcacgatcaaggattcaatggctggagtcccttattctttttaggccatgaactatctaaaaaaacattagggatcatcggcatgggtcagattggcaaggctttggccaaacgtatgcaggactttgatatgaaaattgtttacacacaaaggcatcacttaaaagaagatgaggaaaaagaacttcatgctgttttcttggaaaaagacgaattaattaaacaaagcgatgtaattagcttgcatttgccactaacgaaaaatacccatcacttgttgggtgctaaagaatttgcaactatgaaaaaaacttctttcctaattaacgctgctcgtggaccgttaattgacgaaaatgcattgctacagtccctaaaagaaaagcagcttgctggagctgctttagatgtttatgaacatgaaccaaaagttgatgatcaatttaaacagatgaaaaatgttattctgactccccatatcggcaatgcaaccatcgaagcccgtaatgcaatggctgaagtcgtcgccaaaaatgtggtatcagtgttaaatggtgaaaaaccgaaatatatcgttaattaa

SEQ ID NO: 46 - protein, 319 aa, Oenococcus oeni
MKNVLITAELPQVANSILQQAGLNVEIFTGDKLITKKELLDKVKDKDFLITSLSTDVDEDVINAAPKLKLIANFGAGFNNIDINSARAKEISVTNTPFVSTTSVAEVTAGLIISLSHRLVEGDNLMHDQGFNGWSPLFFLGHELSKKTLGIIGMGQIGKALAKRMQDFDMKIVYTQRHHLKEDEEKELHAVFLEKDELIKQSDVISLHLPLTKNTHHLLGAKEFATMKKTSFLINAARGPLIDENALLQSLKEKQLAGAALDVYEHEPKVDDQFKQMKNVILTPHIGNATIEARNAMAEVVAKNVVSVLNGEKPKYIVN

SEQ ID NO: 47 - DNA, 978 bp, Oenococcus oeni
  CDS (1)..(975): Oenococcus oeni PSU-1: gene OEOE_1709 encoding lactate dehydrogenase
atgtatgctgttttcgaagatgaagtaccttatattgaagagtttgccaatcgtactggccatgaaatcgttcaggaaaccgattatttatccgaaaaaaatgtcgatttggcagccggtttcgatgcggttgttacccaacagacggtcaacattcctgacatggtgtattctcgtctggctgaattaggtatcaggcaaatcagtatccgtcaggttggttacgatattttaaatatcgatgcgattgataaagccggactgcgtgcgtcaaatgtcgcagcttattcgccaagagcgattgccgaatacacattgacacaacttttaaacctgatccgtgacaacaagagatattatcaggccacagaatcgggtaattggttatggtctgcagcccctcaggggaaagaaatccatgatctaacggtcgctgttatcggcgctggacgtattggttcggctctggctgagatgcttcatgtacttggcgcgaaggttttggcagttgatccggtttaccatgctcaaaatgaagcttttttggattatacaaatcttgacgatgctttgaaaagggctgatgttatcactttccatacgcctttaaacaagcagaccaatggtatggccgacaaagatttttttcaaaaagttaaaaagaatgcatacattttaaactttgcccgcggagggattattcaaacttcggctttattggaaaatttgcgtagcggaaaattagctggagcagctctggatgttttgcccaatgaaaccgagtttatgggcaaaatccaaaatcctgacaaacttccggctgatgttcaggaattaatgtcgagggacaacgttttactgtcgccacacgtggctttttatacgaacctggccgttaaaaatatggttgaaatagctttaaacgatgcgattgccctttctcaaggcaaacatatcgagaatgaaattctttattaa

SEQ ID NO: 48 - protein, 325 aa, Oenococcus oeni
MYAVFEDEVPYIEEFANRTGHEIVQETDYLSEKNVDLAAGFDAVVTQQTVNIPDMVYSRLAELGIRQISIRQVGYDILNIDAIDKAGLRASNVAAYSPRAIAEYTLTQLLNLIRDNKRYYQATESGNWLWSAAPQGKEIHDLTVAVIGAGRIGSALAEMLHVLGAKVLAVDPVYHAQNEAFLDYTNLDDALKRADVITFHTPLNKQTNGMADKDFFQKVKKNAYILNFARGGIIQTSALLENLRSGKLAGAALDVLPNETEFMGKIQNPDKLPADVQELMSRDNVLLSPHVAFYTNLAVKNMVEIALNDAIALSQGKHIENEILY

SEQ ID NO: 49 - DNA, 939 bp, Bacillus coagulans
  CDS (1)..(936): Bacillus coagulans 36D1: gene Bcoa_0653 encoding lactate dehydrogenase
atgaaaaaggtcaatcgtattgcagtggttggaacgggtgcagttggtacaagttactgctacgccatgattaatcagggtgttgcagaagagcttgttttaatcgatattaacgaagcaaaagcagaaggggaagccatggacctgaaccacggcctgccatttgcgcctacgccgacccgcgtttggaaaggcgattattccgattgcggcactgccgatcttgttgtcattacggcaggttccccgcaaaaaccgggcgaaacaaggcttgatcttgttgccaaaaacgcaaaaatttttaaaggcatgattaagagcatcatggacagcggctttaacgggatttttcttgttgccagcaacccggttgacattttgacatatgtaacttggaaagagtccggcctgccgaaagaacatgttatcggttcgggcacagtgcttgactccgcgcgtctccgcaactctttaagcgcccacttcggaattgacccgcgcaatgtccatgccgcaattatcggcgaacacggcgacacggaacttccggtttggagccatacaacgatcggttatgacaccattgaaagctatctgcaaaagggaaccattgaccaaaaaacattagatgatatttttgtcaacacgagagatgcggcttaccatatcattgaacgaaaaggggccacattttacggcatcgggatgtctctgacccggatcacaagagcgatcctgaacaatgaaaacagtgttttgacagtctctgcctttttggaaggccagtacggaaacagcgatgtgtacattggtgttcctgccgttattaaccgccaaggcgtccgtgaagtggttgaaatcgagctgaacgacaaagaacaggaacaatttagccattctgttaaagtattaaaagaaacgatggcacctgtattgtaa

SEQ ID NO: 50 - protein, 312 aa, Bacillus coagulans
MKKVNRIAVVGTGAVGTSYCYAMINQGVAEELVLIDINEAKAEGEAMDLNHGLPFAPTPTRVWKGDYSDCGTADLVVITAGSPQKPGETRLDLVAKNAKIFKGMIKSIMDSGFNGIFLVASNPVDILTYVTWKESGLPKEHVIGSGTVLDSARLRNSLSAHFGIDPRNVHAAIIGEHGDTELPVWSHTTIGYDTIESYLQKGTIDQKTLDDIFVNTRDAAYHIIERKGATFYGIGMSLTRITRAILNNENSVLTVSAFLEGQYGNSDVYIGVPAVINRQGVREVVEIELNDKEQEQFSHSVKVLKETMAPVL

SEQ ID NO: 51 - DNA, 984 bp, Bacillus coagulans
  CDS (1)..(981): Bacillus coagulans 36D1: gene Bcoa_3093 encoding lactate dehydrogenase
  tRNA (1)..(3): Met is inserted by tRNA at start codon (GTG) instead of Val
gtgaaaaagacaaaattagtagttgcaggcgttgggcatgtcggttcgtatgtgcttgcaaatgcgatgaaactgggccttttttcggaaattgctgtattggataaaaagaaaggggtcgcatttggggaagcgctcgattggagacatgccacggcacttacatatatgccaaacacaagcgtgaaagcaggggattactcggaatgcgccgatgcggacgtcattatttgtgcagcagggccaagcgtgcttccgtcggaaaaagacgaaatgccggaccgggcagggcttgccaggacgaatgccgccgtggtgcgggaagtcatggcagggattacgaaatatacaaaagaagctgtcatcattttcattacaaatccgcttgatacgattgtctatattgctgaaaatgaatttggctattcgaaagggcggatattcggaacaggcaccatgcttgactcggcccgcctccgccagcttgttgccgaaaattacagcattgatccgaaaagtgtaacgggttatatgatgggcgaacacgggtttaccgcatttccggttttcagtcgtttaaatgtacagggattccgtgaaaaagaactggacagcgtgtttaaaggaaaagaaccgttggacagggaagctttcagacaaaaggtggtgaaaactgcttttgatgtcctgaatgggaaagggtggaccaatgccggtgttgctgaagctgcagtgacattggcaaaagccgtgatgctggatgaaaaaagcatttatccggtttcagccactttgcatggtcagtacggatataacggtgatgtcgctttaagcataccaagtgtcatcggccgtaacgggatcgaacaacagcttgaaattgaactcgatgaacaggaaacatcctggctgcacgaatcggcaaaatcgatccaaaatacaatggcatcggtaaaaaccggaaaatcgtatattcaggcttga

SEQ ID NO: 52 - protein, 327 aa, Bacillus coagulans
VKKTKLVVAGVGHVGSYVLANAMKLGLFSEIAVLDKKKGVAFGEALDWRHATALTYMPNTSVKAGDYSECADADVIICAAGPSVLPSEKDEMPDRAGLARTNAAVVREVMAGITKYTKEAVIIFITNPLDTIVYIAENEFGYSKGRIFGTGTMLDSARLRQLVAENYSIDPKSVTGYMMGEHGFTAFPVFSRLNVQGFREKELDSVFKGKEPLDREAFRQKVVKTAFDVLNGKGWTNAGVAEAAVTLAKAVMLDEKSIYPVSATLHGQYGYNGDVALSIPSVIGRNGIEQQLEIELDEQETSWLHESAKSIQNTMASVKTGKSYIQA

SEQ ID NO: 53 - DNA, 972 bp, Lactococcus lactis
  CDS (1)..(969): Lactococcus lactis subsp. cremoris llmg_1429 (ldhX) gene encoding lactate dehydrogenase
atgaaaattaataataaaaaagttgtaattgtgggagctggagcagtagggagtacttatgctcataatttggtcgttgatgatttagcagatgaaatcgccattatcaatactaataaaagtaaggcttcagccaatagtttggacttacttcatgctctgccttatttaaactcagctcctaaaaatatttatgcagcagactacgctgatgttgctgacgccgatatcgttgttttatccgctaatgctccgtcagctacctttggtaaaaatccagaccgtcttcaattactagaaaataatgttgagatgattcgtgatatcacgcgaaaaacaatggacgctggctttgacggtattttcttagtagcttcaaaccccgtagacgtacttgctcaagtagttgctgaagtttctggcttacctaaacaccggattattggaacaggaaccttgcttgaaacaagtcgaatgcgacaaattgtagctgagaaacttcaaattaaccctaaaagtattcatggttatgttttagctgaacatgggaaatctagttttgccgcttggtccaatgttactgttggggcaattccattaacaacttggcttgaaaaatatccaaatccagattttccgacatttgatgaaattgatcaagaaattcgtgaagttggtttagatattttcatgcaaaaaggaaatacttcatacggaatcgcagcttcattagcacgtttaacaagagcaattttccgaaatgagagcgtcattttacctgtttcggctcatttgacaggtcagtatggacaagctgaactatatacaggtagtccagcaataatcgaccggacaggtgttcgagccgttttagaattggaattaacagcagaagagcaaggtaaatttgaacattctgcagcactcttaaaagagaactttgaatccatcaaggaaaaatgcacattataa

SEQ ID NO: 54 - protein, 323 aa, Lactococcus lactis
MKINNKKVVIVGAGAVGSTYAHNLVVDDLADEIAIINTNKSKASANSLDLLHALPYLNSAPKNIYAADYADVADADIVVLSANAPSATFGKNPDRLQLLENNVEMIRDITRKTMDAGFDGIFLVASNPVDVLAQVVAEVSGLPKHRIIGTGTLLETSRMRQIVAEKLQINPKSIHGYVLAEHGKSSFAAWSNVTVGAIPLTTWLEKYPNPDFPTFDEIDQEIREVGLDIFMQKGNTSYGIAASLARLTRAIFRNESVILPVSAHLTGQYGQAELYTGSPAIIDRTGVRAVLELELTAEEQGKFEHSAALLKENFESIKEKCTL

SEQ ID NO: 55 - DNA, 945 bp, Lactococcus lactis
  CDS (1)..(942): Lactococcus lactis subsp. cremoris llmg_0392 (ldhB) gene encoding lactate dehydrogenase
atgaaaattacaagtagaaaagtagtcgtgattggaacaggatttgtcggaacaagtattgcttattcaatgattaatcaagggcttgtcaacgagttagttttgatagatgtcaatcaagataaagctgagggtgaggctttagatttattggatggcatatcttgggctcaagaaaatgttattgtaagagctggaaattacaaggattgtgaaaatgcagatattgtcgtgattacagctggtgtgaaccaaaaacccggacaatcacgtttagatttggtcaatacaaatgctaaaattatgcgctcaatcgttactcaagttatggattcaggttttgatggtatttttgtaattgcttctaatcctgtggatatccttacctatgtcgcttgggaaacttctggtcttgaccaatctagaattgtcggaactggtacaactttggataccacacgttttagaaaagaattggccacaaaactagaaattgaccctcggagtgttcacggatatattattggtgagcatggcgattctgaagttgcagtttggtcacacactacgataggtggaaaacctattcttgaatttattgttaaaaataaaaaaattggtcttgaagatttgtctaatttgtcaaataaggttaaaaatgctgcttatgaaattattgataaaaaacaagccacttattacggaattggaatgagcacagctagaattgtcaaagccatattaaataatgaacaagtcattctaccagtttctgcctatttgcgtggagaatatggtcaagaaggggtctttactggtgttccatctgtcgtaaatcaaaatggtgtcagagaaattattgaactcaatattgatgcttatgaaatgaaacaatttgaaaagtctgtcagtcaacttaaagaagtcatagaatctattaaataa

SEQ ID NO: 56 - protein, 314 aa, Lactococcus lactis
MKITSRKVVVIGTGFVGTSIAYSMINQGLVNELVLIDVNQDKAEGEALDLLDGISWAQENVIVRAGNYKDCENADIVVITAGVNQKPGQSRLDLVNTNAKIMRSIVTQVMDSGFDGIFVIASNPVDILTYVAWETSGLDQSRIVGTGTTLDTTRFRKELATKLEIDPRSVHGYIIGEHGDSEVAVWSHTTIGGKPILEFIVKNKKIGLEDLSNLSNKVKNAAYEIIDKKQATYYGIGMSTARIVKAILNNEQVILPVSAYLRGEYGQEGVFTGVPSVVNQNGVREIIELNIDAYEMKQFEKSVSQLKEVIESIK

SEQ ID NO: 57 - DNA, 981 bp, Lactococcus lactis
  CDS (1)..(978): Lactococcus lactis subsp. cremoris MG1363: gene llmg_0763 encoding phosphotransacetylase
atggaactttttgaatcactgaaacaaaagattagtggaaaagacttaaaaattgtctttcctgaaggaactgatacacgtattttaggtgctgcaaatcgtcttaatgccgatggattgattacacctgtctttattggaaatgtcaaagaagtcactgaaacattgatttcacgtggaattaacccagagggctttgagatttacgacccagaaaattgtggacgttttgaaacaatgacagaaacatttgttgaacgtcgcaagggtaaagttacagaagaacaagcaaaagaaattttgaaagacccaaattactttggaacaatgcttgtttatatgggaattgctgacggaatggtttctggtgcaattcattcaactgctgatactgttcgtccggctctccaaatcattaaaacaaaaccaggagtaaaatctgtttctggtgcctttattatggttcgcggtcgtgatgacaatgaaaaatatatttttggtgactgtgcaattaacatcaaacctgatgctccaacacttgctgatatcgccgtagcctcagccgaaactgcaagactctttgatattgaccctaaaattgcgatgctttcattctcaactaaaggttctggtaaatcagaagatgtggataaagtggttgaagcaacaacactagttaaagaaggtcaccctgaagttgaaattgatggggaacttcaatttgatgctgcctttgttccagctgttgcacgtcaaaaagcacctgattcagaagttgctggtcgtgcaaacgtctttatcttcccagacattcaatcagggaatattggatacaaaattgcgcaacgtctaggtaattttgaagccattggcccaatcttacaaggattgaatgcgcctgtttctgacctttcacgcggttgtaacgaagaagatgtttataaacttgcaatcatcacagctgctcaagctttaaaataa

SEQ ID NO: 58 - protein, 326 aa, Lactococcus lactis
MELFESLKQKISGKDLKIVFPEGTDTRILGAANRLNADGLITPVFIGNVKEVTETLISRGINPEGFEIYDPENCGRFETMTETFVERRKGKVTEEQAKEILKDPNYFGTMLVYMGIADGMVSGAIHSTADTVRPALQIIKTKPGVKSVSGAFIMVRGRDDNEKYIFGDCAINIKPDAPTLADIAVASAETARLFDIDPKIAMLSFSTKGSGKSEDVDKVVEATTLVKEGHPEVEIDGELQFDAAFVPAVARQKAPDSEVAGRANVFIFPDIQSGNIGYKIAQRLGNFEAIGPILQGLNAPVSDLSRGCNEEDVYKLAIITAAQALK

SEQ ID NO: 59 - DNA, 990 bp, Lactobacillus acidophilus
  CDS (1)..(987): Lactobacillus acidophilus NCFM: gene LBA0704 encoding phosphotransacetylase
atgagcgtattttcattattcaaagaacaagttgaacaagctgatgaaaagaaaaaaattattttcccagaaagtaatgatcttagaatcttaactgcagtttccaatttaaataaggacaatattatcgatccaattttgattggtaaaagagaagatattgaaaaattggctgcagaaaataatttagatcttgatggtgtaaagatttatgatcaaaataattatgctggtttagatgaaatggctgaagcatttgttaaagctagaaaaaaggatactagtattgccgaagcaaaggctaagctagcaaaaggtaattactttggtactatgctagtaaagatgggaaaagctgatggaatggtatcaggtgctgcgcattcaactgctaatactgttttacctgctttacaattaattcatgctgctaaggggatgcatcgcgtatcgggtgctttcgtaatggaaaaaggcgatgaaagatatatttttgctgattgtgctattaatattgatccagatgaagaaactttggcagaaattggttatcaatccgctcaaactgctaaaatggcaggaatcgatcctaaggttgcatttttaagcttttcaactaaagggtcagctgaaggtcctatggtaaataaagttcatgacgctgctgcaatgttccaaaaagatcatccagaaatccctgcagatggtgaattacaatttgatgctgcatttgttccatcagttggtgaaaaaaaagcaccaggctctaaggtggcaggacatgctaatgtatttgtattcccagaacttcaatctggaaatatcgcttataagatggtgcaacgacttggtaactttactgcagtaggtcctattttacaaggtctagctgctccagttaatgacttatcacgtggttgtagtgaacaagatatttacgatttggctatcgttactgctgcacaagctttggcaaaggatgaaaagtaa

SEQ ID NO: 60 - protein, 329 aa, Lactobacillus acidophilus
MSVFSLFKEQVEQADEKKKIIFPESNDLRILTAVSNLNKDNIIDPILIGKREDIEKLAAENNLDLDGVKIYDQNNYAGLDEMAEAFVKARKKDTSIAEAKAKLAKGNYFGTMLVKMGKADGMVSGAAHSTANTVLPALQLIHAAKGMHRVSGAFVMEKGDERYIFADCAINIDPDEETLAEIGYQSAQTAKMAGIDPKVAFLSFSTKGSAEGPMVNKVHDAAAMFQKDHPEIPADGELQFDAAFVPSVGEKKAPGSKVAGHANVFVFPELQSGNIAYKMVQRLGNFTAVGPILQGLAAPVNDLSRGCSEQDIYDLAIVTAAQALAKDEK

SEQ ID NO: 61 - DNA, 990 bp, Lactobacillus delbrueckii
  CDS (1)..(987): Lactobacillus delbrueckii subsp. bulgaricus ATCC 11842 ; gene Ldb0643 encoding phosphotransacetylase
atggaagtttttgaacaattaaagcaattgattaagcaaaaagacaagcagcggatcgttttcccggaaggggaggacccgcggatcctgacggcggtcagccgcttaaagcaagatgacctggttgaaccgatcgtcctggggcaaaaggaccaggtcctggctttggcggaaaaagctggcttggacatgaccgggatcgaaatcgtggactaccaaaacagcccggactttggcgagatggtggaaaagttccacgaacggatggccgggggcaagcacttccagaccatggaagaagcggaagctgccttgcgcgacgccaacttctacgggaccatgctggtttacaccggccaggccgacgggatggtgtccggggcggctcactcaacggccgacacggtccggccagccctcttcattttgaagaccaagccggggatgcaccggatttccggttccttcatcatggaaagaggggaagaaaagtatgtctttgctgactgcgcgatttccatcgacccgaccagcgaccagctggttgaattcgcggcccagtcagctgctacggccaagatgatcgggattgaccccaaggtggccttcctcagcttctcaacccacggctcagccaagggcccgcaggtagacaaggtggcagaagcggccaagctgttcaaggaaaagtacccggacatcccggcagacggcgatttgcagtttgacgcggccttcgtgccggcagttgctgaacttaaggcacctggttcagccgttggcggcagggctaatgtctttatcttcccggaactgcagtcaggcaacattgcctacaagattacccagcgcctgggcaactttacggccatcgggccggttttgcaggggattgccaagccggtcaacgacctctcccggggctgcagcgctgatgacgtctacaagatcgggattttgacggcggctcaagccgttatggaagggtag

SEQ ID NO: 62 - protein, 329 aa, Lactobacillus delbrueckii
MEVFEQLKQLIKQKDKQRIVFPEGEDPRILTAVSRLKQDDLVEPIVLGQKDQVLALAEKAGLDMTGIEIVDYQNSPDFGEMVEKFHERMAGGKHFQTMEEAEAALRDANFYGTMLVYTGQADGMVSGAAHSTADTVRPALFILKTKPGMHRISGSFIMERGEEKYVFADCAISIDPTSDQLVEFAAQSAATAKMIGIDPKVAFLSFSTHGSAKGPQVDKVAEAAKLFKEKYPDIPADGDLQFDAAFVPAVAELKAPGSAVGGRANVFIFPELQSGNIAYKITQRLGNFTAIGPVLQGIAKPVNDLSRGCSADDVYKIGILTAAQAVMEG

SEQ ID NO: 63 - DNA, 978 bp, Lactobacillus casei
  CDS (1)..(975): Lactobacillus casei ATCC 334; gene LSEI_0996 encoding phosphotransacetylase
  tRNA (1)..(3): Met inserted by tRNA at start codon (TTG) instead of Leu
ttggacctatttgaaagtttaaaagacaagattaatggcaaaaatttacggattgtatttccggaaggcgaagatccgcgcgttttgggcgcagcagttcggctcgcagctgacgggttgatacaggccatcgtgctaggtaatcctgataagattcagacattggcagctgctaaaagctgggatctcagcaagttgacagttcgcgatccagccaacgatgaccttcacgctaaaatggttgcggcctttgttgagcgtcgcaaaggcaaggcaaccccagaacaggccgaaaaaattgttcaggatgccaattattttggtacgatgctggtttacatgaaggaagcagacggtatggtttcaggcgcagttcattcaacggctgacacagtccggcctgctttgcaaattatcaagacgcgtcctggcgtgcatttggtcagtggtgcgttcattatgcagcgtggccgtgacgaacgctacttattcgcggataacgccatcaacattgatccagatgctgatcagctggctgaaattgcggttgagtcagctaaaactgctgccttgtttgatatcgaaccaccgcgcgtcgccttgctgtcattctcaaccaaaggcagtgctaagggaccgcaagtagataaggtagttgaagccactaagaaagctcatgaactggcacctgatttggccttagacggtgagttacaatttgatgctgcttttgtcccaaccgttgccaagcaaaaagcccctgattccaaagtggctggggaagcgaatgttttcattttccctgaattacaatccggtaatattggttataagattgcgcaacgattcggcgggtttgaagccattggcccaattttgcaaggtttgaatcagccagtttctgatttgagtcgtggggcaaatgaagaggatgtctataagttggccattattacagcggcccagaccttgctatga

SEQ ID NO: 64 - protein, 325 aa, Lactobacillus casei
LDLFESLKDKINGKNLRIVFPEGEDPRVLGAAVRLAADGLIQAIVLGNPDKIQTLAAAKSWDLSKLTVRDPANDDLHAKMVAAFVERRKGKATPEQAEKIVQDANYFGTMLVYMKEADGMVSGAVHSTADTVRPALQIIKTRPGVHLVSGAFIMQRGRDERYLFADNAINIDPDADQLAEIAVESAKTAALFDIEPPRVALLSFSTKGSAKGPQVDKVVEATKKAHELAPDLALDGELQFDAAFVPTVAKQKAPDSKVAGEANVFIFPELQSGNIGYKIAQRFGGFEAIGPILQGLNQPVSDLSRGANEEDVYKLAIITAAQTLL

SEQ ID NO: 65 - DNA, 978 bp, Lactobacillus plantarum
  CDS (1)..(975): Lactobacillus plantarum WCFS1; gene lp_0807 encoding phosphotransacetylase
atggatttatttgagtcattagcacaaaaaattactggtaaagatcaaacaattgttttccctgaaggaactgaaccccgaattgtcggtgcggcagcgcgattagctgcagacggcttggttaagccgattgttttaggtgcaacggacaaagttcaggctgtggctaacgatttgaatgcggatttaacaggcgttcaagtccttgatcctgcgacatacccggctgaagataagcaagcaatgcttgatgccctcgttgaacggcggaaaggtaagaatacgccagaacaagcggctaaaatgctggaagatgaaaactactttggcacgatgctcgtttatatgggcaaagcggatgggatggtttcaggtgcaatccatccaactggtgatacggtacggccagcgttacaaattattaagaccaagcccggttcacaccgaatctcgggtgcatttatcatgcaaaagggtgaggaacgctacgtctttgctgactgtgccatcaatattgatcccgatgccgatacgttagcggaaattgccactcagagtgcggctactgctaaggtcttcgatattgacccgaaagttgcgatgctcagcttctcaactaagggttcggctaagggtgaaatggtcactaaagtgcaagaagcaacggccaaggcgcaagctgctgaaccggaattggctatcgatggtgaacttcaatttgacgcggccttcgttgaaaaagttggtttgcaaaaggctcctggttccaaagtagctggtcatgccaatgtctttgtatttccagagcttcagtctggtaatattggctataagattgcgcaacgatttggtcattttgaagcggtgggtcctgtcttgcaaggcctgaacaagccggtctccgacttgtcacgtggatgcagtgaagaagacgtttataaggttgcgattattacagcagcccaaggattagcttaa

SEQ ID NO: 66 - protein, 325 aa, Lactobacillus plantarum
MDLFESLAQKITGKDQTIVFPEGTEPRIVGAAARLAADGLVKPIVLGATDKVQAVANDLNADLTGVQVLDPATYPAEDKQAMLDALVERRKGKNTPEQAAKMLEDENYFGTMLVYMGKADGMVSGAIHPTGDTVRPALQIIKTKPGSHRISGAFIMQKGEERYVFADCAINIDPDADTLAEIATQSAATAKVFDIDPKVAMLSFSTKGSAKGEMVTKVQEATAKAQAAEPELAIDGELQFDAAFVEKVGLQKAPGSKVAGHANVFVFPELQSGNIGYKIAQRFGHFEAVGPVLQGLNKPVSDLSRGCSEEDVYKVAIITAAQGLA

SEQ ID NO: 67 - DNA, 972 bp, Pediococcus pentosaceus
  CDS (1)..(969): Pediococcus pentosaceus ATCC 25745; gene PEPE_0337 encoding phosphotransacetylase
atggatttatttgaaggtttgaagtcaaaaattaagggccaaaatagaacagttgtatttcccgaaggtgaagatgttcgagttttagctgccgctattcgactagctgatgatggcttagttcaatcaatcttactcggagtggaagctgatattaaagctactgctgaaaagcatggattaaaccttgaaaatgtgcaaattattgatccgagccaatatccggaagccgatcaaaaggaaatgattgataagttagttgaacgtcgtaagggtaaaaataccgaagaacaggttatcgaaatgctcaaagatgtaaattacttcggaactatgctagtttacttaggcaaggcggatgccatggtatctggagcagttcatgctactggtgatacagttcgccccgctcttcaaattatcaagactaaaccaggaatgcgtcgaattagtggagcatttatcatgcaacgcgaaaatgaacgctatgtctttggggatgcagctattaatattgatcccgatgcagaaacattggctgaaattgcgattcaaagtgcagaaactgctcgcctatttgacatcgaccctaaggttgcaatgttaagcttttcaactaaaggctcagcggctggaccaatggtagataaagttcgcgaagctactaaggttgcccaagaacgtgatccaaagaccccatatgatggtgaacttcagtttgatgcagcctttgttccagctgttggagcaagtaaggctccagattcagaaattgcaggacatgcgaatgtctttatcttccctgaacttcaatctggaaacattggttataagattgctcaacgtctaggcggttttgaagcaattggcccaatcttgcaaggacttaatgcaccggtttccgatttatctcgtggagctagtgaagaagatgtctataaagtagcaattattaccgcagctcaagtttag

SEQ ID NO: 68 - protein, 323 aa, Pediococcus pentosaceus
MDLFEGLKSKIKGQNRTVVFPEGEDVRVLAAAIRLADDGLVQSILLGVEADIKATAEKHGLNLENVQIIDPSQYPEADQKEMIDKLVERRKGKNTEEQVIEMLKDVNYFGTMLVYLGKADAMVSGAVHATGDTVRPALQIIKTKPGMRRISGAFIMQRENERYVFGDAAINIDPDAETLAEIAIQSAETARLFDIDPKVAMLSFSTKGSAAGPMVDKVREATKVAQERDPKTPYDGELQFDAAFVPAVGASKAPDSEIAGHANVFIFPELQSGNIGYKIAQRLGGFEAIGPILQGLNAPVSDLSRGASEEDVYKVAIITAAQV

SEQ ID NO: 69 - DNA, 981 bp, Leuconostoc mesenteroides
  CDS (1)..(978): Leuconostoc mesenteroides subsp. mesenteroides ATCC 8293; gene LEUM_1466 encoding phosphotransacetylase
atggaactttttgagcaattaaaaaataaaattaccggtcaaaataagacaattgtatttccggaaggtgaagatccccgtatccagggcgcagctatcagattagcagctgataatttgatcgagccaatattgttgggggatgcacaggaaatttcaaaaactgcccaagcccataactttgatttatcgaacatagagacgattgatcctgcttcatatgatgagaatgaattggcaaaattaaatgcgacacttgtcgaaaggcgcaaagggaaaacagacgctgagacagctgccaaatggctacaaaatgttaactattttgggacaatgctggtttatactggcaaagctgacggtatggtgtcaggcgcagtacatccaactggtgatacagttcgtcctgcgttgcagatcattaaaacggcgcctggctcatcacgtatttctggtgcattcattatgcaaaaaggcgaagagcgttatgtatttgcggacgctgccattaacattgacattgattcggacacgatggctgaaattgcaatacaatcagcccacacagctcaagtgtttgatattgaaccaaaagttgcgatgctttcattttcaactaagggctccgcgaaatcacccttggtcgataaggtggcaactgccactgcattggctaagaagttagcacctgaactggcggactcaattgatggagagttacagtttgatgctgcgtttgttgaatctgttgctgccgcaaaggcgcctgattcaaaagtcgcaggtaaagcgaacacatttattttcccaagtctagaagcaggtaatattggctataaaattgcacaacgcttgggtgggtttgaagcgattggacctattttacaaggcttagcaaaacctgtttctgatttatcgcgaggagccaatgaagaggatgtttataaagtagctattattactgctgcgcaagcattataa

SEQ ID NO: 70 - protein, 326 aa, Leuconostoc mesenteroides
MELFEQLKNKITGQNKTIVFPEGEDPRIQGAAIRLAADNLIEPILLGDAQEISKTAQAHNFDLSNIETIDPASYDENELAKLNATLVERRKGKTDAETAAKWLQNVNYFGTMLVYTGKADGMVSGAVHPTGDTVRPALQIIKTAPGSSRISGAFIMQKGEERYVFADAAINIDIDSDTMAEIAIQSAHTAQVFDIEPKVAMLSFSTKGSAKSPLVDKVATATALAKKLAPELADSIDGELQFDAAFVESVAAAKAPDSKVAGKANTFIFPSLEAGNIGYKIAQRLGGFEAIGPILQGLAKPVSDLSRGANEEDVYKVAIITAAQAL

SEQ ID NO: 71 - DNA, 984 bp, Streptococcus thermophilus
  CDS (1)..(981): Streptococcus thermophilus CNRZ1066; gene str1455 encoding phosphotransacetylase
atgcgtagtctatttggtgaacttcgtgaacatatttcagggaaaggagttaggattgttttccctgagggtaatgatgaccgtgtggttcgtgcagctgcccgtttgaaatttgaagaattagttgatcctattattttgggagaccctacagaggttcacaaaatcttgaacgatcttggttttgtagactttaactgtactattattaatcctgaaacctatgaaggcttcgaggaaatgaaggaaaaatttgttgaagtccgtaaagggaaagcgacaattgaagatgcagacaagttgcttcgtgatgtcaactattttggtgttatgctagttaaacttggtttagcagatggaatggtttcaggcgcgattcactcaacagcggataccgttcgtcctgctcttcaaattatcaaaacgaaacctggtatttcttgtacatcaggtgtcttccttatgaaccgtgaagataccaatcatcgcttgatgtttgccgactgtgctatcaatattgaaccaaattctcaagaattagcagaaattgcaattaatactgcagaaacagctaaagtttttggtattgatcctaaagtggcaatgcttagcttctcaacaaaaggttccgctaaatcaccaaaagttgacagggttgttcaagcaacaaatattgctaaagaaatgcgtcctgacttggctattgatggtgagttgcagtttgatgcagcctttgttccagcaacagcagctattaaggcaccagacagtgacgtagcaggacaagctaacgtctttgtcttcccatgtttacaggctggtaatattggttataagattgcccaacgtttgggaatgtttgaggctatcggaccaatcttacaaggtcttaataaaccagtaaacgatctttctcgtggtgctagtgctgaagatatttacaacttagctattatcacagctgctcaagctcttaataattaa

SEQ ID NO: 72 - protein, 327 aa, Streptococcus thermophilus
MRSLFGELREHISGKGVRIVFPEGNDDRVVRAAARLKFEELVDPIILGDPTEVHKILNDLGFVDFNCTIINPETYEGFEEMKEKFVEVRKGKATIEDADKLLRDVNYFGVMLVKLGLADGMVSGAIHSTADTVRPALQIIKTKPGISCTSGVFLMNREDTNHRLMFADCAINIEPNSQELAEIAINTAETAKVFGIDPKVAMLSFSTKGSAKSPKVDRVVQATNIAKEMRPDLAIDGELQFDAAFVPATAAIKAPDSDVAGQANVFVFPCLQAGNIGYKIAQRLGMFEAIGPILQGLNKPVNDLSRGASAEDIYNLAIITAAQALNN

SEQ ID NO: 73 - DNA, 990 bp, Oenococcus oeni
  CDS (1)..(987): Oenococcus oeni PSU-1; gene OEOE_1435 encoding phosphotransacetylase
atgacaaatttatttactgagttggctgataaaattaaggaaaaaaaactgagactcgtttttccggaaggcgatgattcaagagtccagggggcggccatccgtttaaaaaaagatggtttactaacgccgatattattgggagatcaggcagcggtcgaaaagacagctgcagataatcatttcgacctgagtggcatcaagcttatcgatccgcttaaattcgatgagaagcagttcaatcaattgatcgataaactggttacccgacgaaaagggaaaactgacccgcaaacggtagctatgtggctgcaggaagtaaattatttcggtaccatgcttgtttataccggcaaggccgacgcaatggtttccggtgctgttcatccaaccggcgatacggttcgtcccgctttgcagattatcaagacagctcctggtgtcagtcgtatttccggtgcttttattatgcaaaaaaatgatgaacgctatctgtttgccgattcggcaattaatatcgaacttgatgcacaaaccatggctgagattgccgttcaatcagcccatacggctaaaatatttggaatcgatccaaaagttgccatgctgagtttttcaaccaaaggatcggcaaaacatgcattggtcgataaagttgctcaggcaactaagctggcgcaggagatggcaccggatttagctgataatattgatggtgaattacaattcgatgcagcttttgtcgaatcggttgccaaattaaaagctccgggatcaaaagtggccggtcatgcgaacgttttcatttttccaagtttggaagccggaaatattggttataaaattgcccaacgcttgggtggatacgaagcaattggtcctattttgcaaggattggcagcacctgtttccgatctgtcgcgtggagcaagtcaagaagacgtatataaagttgcaattattactgctgctcaggctttaaaaaattag

SEQ ID NO: 74 - protein, 329 aa, Oenococcus oeni
MTNLFTELADKIKEKKLRLVFPEGDDSRVQGAAIRLKKDGLLTPILLGDQAAVEKTAADNHFDLSGIKLIDPLKFDEKQFNQLIDKLVTRRKGKTDPQTVAMWLQEVNYFGTMLVYTGKADAMVSGAVHPTGDTVRPALQIIKTAPGVSRISGAFIMQKNDERYLFADSAINIELDAQTMAEIAVQSAHTAKIFGIDPKVAMLSFSTKGSAKHALVDKVAQATKLAQEMAPDLADNIDGELQFDAAFVESVAKLKAPGSKVAGHANVFIFPSLEAGNIGYKIAQRLGGYEAIGPILQGLAAPVSDLSRGASQEDVYKVAIITAAQALKN

SEQ ID NO: 75 - DNA, 972 bp, Bacillus coagulans
  tRNA (1)..(3): Met inserted by tRNA at start codon (GTG) instead of val
  CDS (1)..(969): Bacillus coagulans 36D1; gene Bcoa_1406 encoding phosphotransacetylase
gtgagtacattttttgacgggataaaagaaaaagtgcggggacataacaaaacgattgtttttccggaaagttcggatgaaagggttttaacagccgtctcccggtttgcagccgatgaagtactccggccggttttaatcgggaacaaggataaaattcaggcaaaagcccaggccatcggtgtttctgtcaagggcgttacagtgtatgacccggaagactatgccggttttgaagaaatggtgcaggcttttgtggaacgaagaaaaggcaaagcgacggaggaagatgcgcgccaaattttaaaagacgtcaattatttcggcaccatgctcgtctatttgaaaaaagcggacggtctggtaagcggtgccatccattcaacggcagatacagtccggccggcattgcagatcattaaaacaaaaccgggcgtgaaaaaagtttctggcgttttcattatggtgaggggcgaagagaaatttgttttcgccgattgtgcaatcaatatttcaccggacagccaagacttggcggaaacggccgtggagagcgcgaaaactgcccggacatttgatattgaaccgaggattgcgatgttgagcttttcaacaagaggttccgcccattccgatgagacggagaaagtggcgcaggcagtccgattggctaaagagcgcgatccggagcttgtcatggacggcgagatgcagtttgatgccgcgtatgtgccggctgtggcgcaaaagaaagcgccggattccgtgattcaggggaatgcaactgtgtttatttttccaaatctggatgcggggaatatcggttataaaatggcccagcgtcttggcggttttgaagcagtcggtccgattttgcaagggctgaatgcgcctgtcaacgatttgtcgcgcggctgcaatgcggaagatgtttatcatttggctttgatttccgcagcacaaagtttgtaa

SEQ ID NO: 76 - protein, 323 aa, Bacillus coagulans
VSTFFDGIKEKVRGHNKTIVFPESSDERVLTAVSRFAADEVLRPVLIGNKDKIQAKAQAIGVSVKGVTVYDPEDYAGFEEMVQAFVERRKGKATEEDARQILKDVNYFGTMLVYLKKADGLVSGAIHSTADTVRPALQIIKTKPGVKKVSGVFIMVRGEEKFVFADCAINISPDSQDLAETAVESAKTARTFDIEPRIAMLSFSTRGSAHSDETEKVAQAVRLAKERDPELVMDGEMQFDAAYVPAVAQKKAPDSVIQGNATVFIFPNLDAGNIGYKMAQRLGGFEAVGPILQGLNAPVNDLSRGCNAEDVYHLALISAAQSL

SEQ ID NO: 77 - DNA, 2712 bp, Lactococcus lactis
  CDS (1)..(2709): Lactococcus lactis subsp. cremoris MG1363; gene llmg_2432 encoding alcohol dehydrogenase
atggcaactaaaaaagccgctccagctgcaaagaaagttttaagcgctgaagaaaaagccgcaaaattccaagaagctgtcgcttatactgatcaattagtcaaaaaagctcaagctgcagttcttaaatttgaaggatacacacaaactcaagttgatactattgttgctgcaatggctcttgcagcaagcaaacattctctggaactcgctcacgaagccgttaatgaaactggccgtggagttgttgaggacaaagatacaaaaaaccattttgcttctgaatctgtttataatgcaatcaaaaatgataaaacagttggcgttatcgctgaaaacaaagttgctggttctgttgaaatcgcaagcccccttggagtacttgctggtattgtcccaacaactaatccaacatcaacagccatctttaaatcattattaactgcaaagacacgtaatgctattgtctttgcctttcacccacaagcacaaaaatgctcaagccatgcggcaaaaattgtttatgatgctgcgattgaagctggtgcacctgaagactttattcaatggattgaagtacccagtcttgatatgacgactgctttgattcaaaatagaggaattgctacaattcttgcaactggtggtccaggtatggtcaatgccgcgcttaagtctggtaatccttcacttggtgtaggtgctggtaatggtgcagtttatgttgatgcaactgcaaatatcgatcgtgctgttgaagatcttttgctttcaaaacgttttgataacggaatgatttgtgcgactgaaaactctgcagttattgatgcatcaatctatgatgaatttgtcgctaaaatgcaagcgcaaggcgcttatatggttcctaaaaaagattacaaggcaattgaaagttttgttttcgttgaacgtgctggtgaaggttttggtgtaactggtcctgttgctggtcgttctggtcaatggattgctgaacaagctggtgttaacgtccctaaagataaagatgttcttctttttgaacttgataagaaaaatattggggaagctctttcttctgaaaaactttctcctttgctttcaatctacaaatcagaaacacgtgaagaaggaattgaaattgtacgtagcttacttgcttaccaaggagctggtcacaacgctgccattcaaatcggtgcaatggacgacccatttgtcaaagaatacggaattaaagtcgaagcttctcgtatcctcgttaaccaacctgactctatcggtggggtcggagatatttatactgatgcaatgcgtccatcattgacgctcggaactggttcatgggggaaaaattcactttcacacaatttgagtacatacgatctattgaatgttaaaacagtggctaaacgtcgtaatcgccctcaatgggttcgtttgccaaaagaaatttactacgaaaaaaatgcaatttcttacttacaagaattgccacacgtccacaaagctttcattgttgccgaccctggtatggttaaattcggtttcgttgataaagttttggaacaacttgctatccgcccaactcaagttgaaacaagcatttatggctcagtccaacctgacccaactttgagtgaagccattgcaatcgctcgtcaaatgaaacaatttgaacctgacactgtcatctgtcttggtggtggttctgctctcgatgctggtaagattggtcgtttgatttatgaatatgatgctcgtggtgaggctgacctttccgatgacgcaagtttgaaagagatcttccaagagttagctcaaaaatttgttgatattcgtaaacgtattatcaaattctaccacccacacaaagcacaaatggttgctatccctactacttctggtactggttctgaagtgactccatttgcggttatcactgatgatgaaactcacgttaaatatccacttgctgactatcaattgacacctcaagttgccattgttgaccctgagtttgttatgactgtaccaaaacgtactgtttcttggtctgggattgatgctatgtcacacgcgcttgaatcttatgtttctgtcatgtcttctgactatacaaaaccaatttcacttcaagccatcaaactcatctttgaaaacttgactgagtcttatcattatgacccagctcatccaaccaaagaaggtcaaaaagctcgcgaaaacatgcacaatgctgcaacactcgctggtatggccttcgccaatgctttccttggaattaaccactcacttgctcataaaattggtggtgaatttgggcttcctcatggtcttgccattgctatcgctatgccacatgtcattaaatttaacgctgtaacaggaaacgttaaacgtaccccttacccacgttatgaaacttatcgtgcgcaagaagactacgctgaaatttcacgcttcatgggatttgctggcaaagaagattcagatgaaaaagcggtcaaagctttggttgctgaacttaaaaaattgactgatagtattgatattaatatcaccctttcaggaaatggtgtagataaagctcatcttgaacgtgagcttgataaattggctgaccttgtttacgatgaccaatgtacacctgctaatccacgtcaaccaagaattgatgagattaaacaactcttgttagaccaatattaa

SEQ ID NO: 78 - protein, 903 aa, Lactococcus lactis
MATKKAAPAAKKVLSAEEKAAKFQEAVAYTDQLVKKAQAAVLKFEGYTQTQVDTIVAAMALAASKHSLELAHEAVNETGRGVVEDKDTKNHFASESVYNAIKNDKTVGVIAENKVAGSVEIASPLGVLAGIVPTTNPTSTAIFKSLLTAKTRNAIVFAFHPQAQKCSSHAAKIVYDAAIEAGAPEDFIQWIEVPSLDMTTALIQNRGIATILATGGPGMVNAALKSGNPSLGVGAGNGAVYVDATANIDRAVEDLLLSKRFDNGMICATENSAVIDASIYDEFVAKMQAQGAYMVPKKDYKAIESFVFVERAGEGFGVTGPVAGRSGQWIAEQAGVNVPKDKDVLLFELDKKNIGEALSSEKLSPLLSIYKSETREEGIEIVRSLLAYQGAGHNAAIQIGAMDDPFVKEYGIKVEASRILVNQPDSIGGVGDIYTDAMRPSLTLGTGSWGKNSLSHNLSTYDLLNVKTVAKRRNRPQWVRLPKEIYYEKNAISYLQELPHVHKAFIVADPGMVKFGFVDKVLEQLAIRPTQVETSIYGSVQPDPTLSEAIAIARQMKQFEPDTVICLGGGSALDAGKIGRLIYEYDARGEADLSDDASLKEIFQELAQKFVDIRKRIIKFYHPHKAQMVAIPTTSGTGSEVTPFAVITDDETHVKYPLADYQLTPQVAIVDPEFVMTVPKRTVSWSGIDAMSHALESYVSVMSSDYTKPISLQAIKLIFENLTESYHYDPAHPTKEGQKARENMHNAATLAGMAFANAFLGINHSLAHKIGGEFGLPHGLAIAIAMPHVIKFNAVTGNVKRTPYPRYETYRAQEDYAEISRFMGFAGKEDSDEKAVKALVAELKKLTDSIDINITLSGNGVDKAHLERELDKLADLVYDDQCTPANPRQPRIDEIKQLLLDQY

SEQ ID NO: 79 - DNA, 2631 bp, Lactobacillus acidophilus
  CDS (1)..(2628): Lactobacillus acidophilus NCFM; gene LBA0461 encoding alcohol dehydrogenase
atggctaaggcacaacaaaaagaaactcctactgaggaagaaaagaaaaagcaaatctacgacatggtagataatttagtaaaaagatcacatgttgcattagatgaaatggctaacttcacacaagaacaagttgataagatctgtgaagcagttgctactgcaggtgaacaaaacgcttacccactagctaaaatggctgttgaagaaactaagcgtggtgtagtagaagataagactactaaaaacatgtacgctagtgaaaatatttggaacagtttacgccacgaaaaaactgttggtgtaattgaagaagataaggaactaggattaactaagattgctgaacctaagggtgttattgccggtgttactccagtaactaacccaacttcaactgttattttcaaagcaatgcttgctctaaagacgagaaatactattatttttggtttccacccacaagctcaaaaatgttgtgtagaaactggtaaaattatccaagcggctgctgttgctgcaggtgcacctaaagatgcaattttatggattgaagagccaagtttggatgcaaccactgatttaatgaataatccaggtgttcaaactattttggccactggtggtccaggtatggttaaggctgcatattcatcaggtaaaccagctatcggtgttggtcctggtaatggtccttcatacattgaaaaatcagctaatatcggtcgtgctgtttatgatattgttttatcaaagaacttcgataacggtatggtttgtgcttctgaaaactcagtcgttgtagatgacgcaatttatgacaaggctgtagaagaatttaagaagtggggttgttacttcttaaataaagaagaaattaagaaatttgaagaacactttattgatccaagacgtggtactgttgcaggtcctgtagctggtaaatcagcttatgaaattgctaaactttgtggtgttgatgtaccaaagactactaaagtaattgttgctgaatacaaaggtgttggtagaaagttcccactttcagctgaaaaactttctcctgtctttactttatatcgcgctaagaatcatgacgatgcatttaagatttgttctgaacttcttgattatggtggtcgtggtcataccgcgggaattcactcaagcgatcaaaatataattgatgaatttgcaatgaagatggatgcttgtcgtattctagttaattcaccagctgcacttggtggtattggtgatctttacaacaatatgttgccttcacttacattaggtacaggttcatacggtgctaacacattttcacacaatattggtgccagagatttacttaatattaaaacggttgcgaaacgtcgcgacaatatgcaatgggtaaaagttccatcaaagacttactttgaacataatgctgctaattatttgcgtcacatgccaaatgttaaccgtttcttcattgttactgatgaaggcgtagctgaccaaggctttgctgacgaaatcactgatattatttctaagcgtcgtggtcaaaaagaatatgaagtatttaaggctgtaacgcttgatcctgatactgatgtaattaaagacggtgttcacagaatgaacatctttaagcctgacgtaattattgctattggtggtggctcagtaatggatgctgctaaagtaatgcgcttattctacgaaaatccagaaatgagctttgaagaagcttaccaaaagtttttggatatcagaaaaagagtagtccgcttccctaagattaatggtgttcaacttgtatgtattccaacaacttctggtactggttcagaagtttccccaattgcagttattagcgatactaaaacaggtatgaaacacactctttgtgattatgctttaactccagatgtttcaattgttgatgatcaatttgttcaaaatatgcctaaacgcttaattgcttggtcaggttttgaagcattaggtcatgctattgaaagctatgtttcaactatggccactgatttcactcgtggttggtcacttgaagctattaaagcgatctttgcaaacttgaagaagtcatacgatggtgatcttgatgcaagaaagcaaatgcatgatgctgcaactattgcaggtatggcatattcaaatgcattccttggtcttgaacactcaattgctcatactgttggctcaacctttgatattccaagcggagtaagtgatgcgattgctttaccgcaagttattcgctttaatgccaaacgtcctgaaaagctcgctatgtggcctcactactcagtatatcgtgctgaaagtgactatgctgatattgcaagagctatcggtttgactggttcaagtgatgctgaattagttgaaaaactggttcaaaagattattgaattggctcattctgttggtattaagatggcttataaggattatggcgttgacaagactgaatttgataagaaagttgatcaaatggcagttgaagcttatggtgatcaaaatactgtaactaatccatcagcaccacttattacacaaattgttgtcttaatgaaagattgctacgaaggcaaaggtatttcagacaatgataaataa

SEQ ID NO: 80 - protein, 876 aa, Lactobacillus acidophilus
MAKAQQKETPTEEEKKKQIYDMVDNLVKRSHVALDEMANFTQEQVDKICEAVATAGEQNAYPLAKMAVEETKRGVVEDKTTKNMYASENIWNSLRHEKTVGVIEEDKELGLTKIAEPKGVIAGVTPVTNPTSTVIFKAMLALKTRNTIIFGFHPQAQKCCVETGKIIQAAAVAAGAPKDAILWIEEPSLDATTDLMNNPGVQTILATGGPGMVKAAYSSGKPAIGVGPGNGPSYIEKSANIGRAVYDIVLSKNFDNGMVCASENSVVVDDAIYDKAVEEFKKWGCYFLNKEEIKKFEEHFIDPRRGTVAGPVAGKSAYEIAKLCGVDVPKTTKVIVAEYKGVGRKFPLSAEKLSPVFTLYRAKNHDDAFKICSELLDYGGRGHTAGIHSSDQNIIDEFAMKMDACRILVNSPAALGGIGDLYNNMLPSLTLGTGSYGANTFSHNIGARDLLNIKTVAKRRDNMQWVKVPSKTYFEHNAANYLRHMPNVNRFFIVTDEGVADQGFADEITDIISKRRGQKEYEVFKAVTLDPDTDVIKDGVHRMNIFKPDVIIAIGGGSVMDAAKVMRLFYENPEMSFEEAYQKFLDIRKRVVRFPKINGVQLVCIPTTSGTGSEVSPIAVISDTKTGMKHTLCDYALTPDVSIVDDQFVQNMPKRLIAWSGFEALGHAIESYVSTMATDFTRGWSLEAIKAIFANLKKSYDGDLDARKQMHDAATIAGMAYSNAFLGLEHSIAHTVGSTFDIPSGVSDAIALPQVIRFNAKRPEKLAMWPHYSVYRAESDYADIARAIGLTGSSDAELVEKLVQKIIELAHSVGIKMAYKDYGVDKTEFDKKVDQMAVEAYGDQNTVTNPSAPLITQIVVLMKDCYEGKGISDNDK

SEQ ID NO: 81 - DNA, 2607 bp, Lactobacillus casei
  CDS (1)..(2604): Lactobacillus casei ATCC 334; gene LSEI_0775 encoding alcohol dehydrogenase
atgttaaagaatactgcgaagactgctaccgaagttgatgtaaagagcatggttgacgaactggttgcgaatgcgcatgccgctttgaagatcatgaaaactttcgatcaagaaaagatcgatcacatcgttcatcggatggcaatcgctggtttggatcatcatatggaattggcaaaactcgctgttgacgagacgggccgtggcgtgtgggaagataaagcgatcaagaacatgttcgccaccgaagaaatttggcactcaatcaagaacaacaagaccgttggtgtgatcaacgaagacaaacaacgcggcttggtatcgattgctgaaccaattggtgtcattgctggtgtgacgccagtgacgaacccaacttcaacgaccatgttcaaatccgaaattgccattaaaacccgtaatccaatcattttcgctttccatccgggtgcccaaaagtcttcagcgcgtgcgttggaggtcatccgtgatgaagccgaaaaagcaggcttaccaaagggtgctttgcaatatatccctgtaccaagtatggatgcgactaaagctttgatggatcaccctggtatcgccacgattttggcaacgggcggtcctggcatggttaagtccgcctattcatcaggcaagccagcactgggtgttggggccgggaatgcgccagcttacattgaagccagcgctaacatcaaacaagctgtcaatgacttagtactttcaaagagttttgataatggtatgatttgtgcttccgaacaaggcgtgattattgattccagcatttacgatgatgtgaagaaggaatttgaagcccaaggtgcttacttcgttaaacagaaggacatgaagaagttcgaaagtaccgtcattaatcttgaaaagcaaagtgtcaatccgcgaatcgttggtcaaagtcctaagcagattgctgaatgggcggggatcacgattcctgataacaccacgattctgattgctgaattgaaaggtgttggcgaaaagtatccactgtctcgtgaaaaactaagtccagtactggccatggtcaaagcagatggtcatgaagatgccttcaagaaatgtgaaaccatgcttgatatcggcggtttgggtcatacggcagtcattcacacggctgatgatgagttagctttgaagtatgccgatgctatgcaagcttgccggattttgatcaacacaccatcttctgtcggcgggattggcgatctttacaacgaaatgattccaagtttgacactgggctgcggctcatacggtggtaactcaatttcgcataacgtggggacggtcgacttgcttaacatcaagacaatggcaaaacgccgcaataacatgcagtggatgaaattgccaccaaagatctattttgaaaagaattctgttcgttacctcgaacacatggaaggcatcaaacgggccttcatcgttgctgatcgaagcatggaaaagttaggcttcgtcaagatcgttgaagatgttctggctcggcgtgaaaatcctgttcaagttcagacttttgtcgatgttgaacctgatccatcaactgacacggtcttcaaggggaccgatatcatgcgctcatttggaccggataccgtcattgctatcggcggcgggtctgttatggatgctgccaaagggatgtgcttgttcaacgatgccggggatgctgatttcttcggcgctaagcagaaattcttggatatccggaagcggacttacaccttcccgaatctgaataagacaaagcttgtctgcattccaacaacttctgggactggttcagaagtaacaccttttgcggttatcaccgattccaaggctggcatcaagtatccgttagctgactatgcattgacgccagacatcgcgattgtggacagtcagttcatcgaatccgtaccgccagtggttgtcgctgattccggtttggatgtgctctgccacgcaaccgaaagttatgtttcgaccatggccactcattacacgaagggcctgagtttggaagcaatcaagttggtcttcgaaaatctggaaaagagttatcatggcgacgtcgaagcaaagtcaaagatgcatgatgcttcaaccattgccgggatggcctttgccaacgcactgttgggcattaaccacagcattgcgcataagattgggcaagcgttccatctgcctcacggtcgttgcatcgcgatcacgatgccacatgttattcgcttcaatgcgagtcaaccgaagaagcgcgctatctgggcgaagtatagctacttccgcgctaacgaagactacgcagaaatcgctcgctaccttggccttcctggcaagacaactgatgaattggttgaaagctatgtccaggccttcatcaagctggctcacagtgttggcgtcaagctcagtttgaaggaacaaggcgttaaaaaggctgatctcgacaagcaagttgatcgtcttgccgaactggcttatgaagacaactgcaccgttaccaacccgcaagaaccgttaatcggcgacttgaagcatatcatccttgatgaatatgaaggcaccgaatccactttctaa

SEQ ID NO: 82 - protein, 868 aa, Lactobacillus casei
MLKNTAKTATEVDVKSMVDELVANAHAALKIMKTFDQEKIDHIVHRMAIAGLDHHMELAKLAVDETGRGVWEDKAIKNMFATEEIWHSIKNNKTVGVINEDKQRGLVSIAEPIGVIAGVTPVTNPTSTTMFKSEIAIKTRNPIIFAFHPGAQKSSARALEVIRDEAEKAGLPKGALQYIPVPSMDATKALMDHPGIATILATGGPGMVKSAYSSGKPALGVGAGNAPAYIEASANIKQAVNDLVLSKSFDNGMICASEQGVIIDSSIYDDVKKEFEAQGAYFVKQKDMKKFESTVINLEKQSVNPRIVGQSPKQIAEWAGITIPDNTTILIAELKGVGEKYPLSREKLSPVLAMVKADGHEDAFKKCETMLDIGGLGHTAVIHTADDELALKYADAMQACRILINTPSSVGGIGDLYNEMIPSLTLGCGSYGGNSISHNVGTVDLLNIKTMAKRRNNMQWMKLPPKIYFEKNSVRYLEHMEGIKRAFIVADRSMEKLGFVKIVEDVLARRENPVQVQTFVDVEPDPSTDTVFKGTDIMRSFGPDTVIAIGGGSVMDAAKGMCLFNDAGDADFFGAKQKFLDIRKRTYTFPNLNKTKLVCIPTTSGTGSEVTPFAVITDSKAGIKYPLADYALTPDIAIVDSQFIESVPPVVVADSGLDVLCHATESYVSTMATHYTKGLSLEAIKLVFENLEKSYHGDVEAKSKMHDASTIAGMAFANALLGINHSIAHKIGQAFHLPHGRCIAITMPHVIRFNASQPKKRAIWAKYSYFRANEDYAEIARYLGLPGKTTDELVESYVQAFIKLAHSVGVKLSLKEQGVKKADLDKQVDRLAELAYEDNCTVTNPQEPLIGDLKHIILDEYEGTESTF

SEQ ID NO: 83 - DNA, 1194 bp, Lactobacillus casei
  CDS (1)..(1191): Lactobacillus casei ATCC 334; gene LSEI_2125 encoding alcohol dehydrogenase
  tRNA (1)..(3): Met inserted by tRNA at start codon (TTG) instead of Leu
ttgaagaattttcgatttcagaataaaaccgatattcgttttggtacaggccgattagatgttgagctgcacgacgcggtgagtcaatttggttcgcgtgttttgttcgtttatggtggccattccatcaaaaagtcaggcttatacgataccgtgactggactgctcgctgatttgcagttaaccgaattgccgggcattgagccgaacccgaagatcgattctatccgtgctggccaaaagctggcgaaggatcaggatattgatgttgttttggcagttggtggcggctccgtcattgatgctgcaaaagtcattgccagcgccaagttttacgaaggcgacccctgggatcttgtcaaagatcgtggtgtaactcgccggaaattgcagcaattgccagtcgtcgatattctgacattagcagcgaccggcagtgagatgaacagtggctccgtgatttcaaatcctgtcactcatgaaaagctcggcacagtcgggccaaacacaccagcggtttcatttttggatccgtcactgacctttactgtgccagccagacaaacggcggcgggatcaatggatattcttagtcatttgcttgaacaatattttgatcgttcaaaaaataatgacgccagcaaaggcatgattgaaggcttgatgcgcacagttattaagtgggcgcccattgcgttgaaacaacccgataactatgatgcccgcgccaacttaatgtggagcgcaacgatggcgctaaacggtatcgtgagtgttgctaacgaaaatggctggacagtgcatagccttgaacatgaactatcagcttattatgacattacccatggtgtcggccttggcattttaacaccgcgttggatgtcgtttattctgaccaaggacgcaacgacagcagaaatgttggcacaatttggtcgccatgtctgggatcttgaaggtgatgaatcttatgccgtggcgcaagcggctattgacgcgacctttgattggattagtcgcttagggttcccgatgaccttgcctgaagttgggatcaaggatactcagcattttgatgccatggcgactgctgctgttgccaatgctagtcttgaaacgcgcgcctatgtgccgttgtcggtagaagatgtcgaaacgatttatcaagcatccatgacagatgggctggcataa

SEQ ID NO: 84 - protein, 397 aa, Lactobacillus casei
LKNFRFQNKTDIRFGTGRLDVELHDAVSQFGSRVLFVYGGHSIKKSGLYDTVTGLLADLQLTELPGIEPNPKIDSIRAGQKLAKDQDIDVVLAVGGGSVIDAAKVIASAKFYEGDPWDLVKDRGVTRRKLQQLPVVDILTLAATGSEMNSGSVISNPVTHEKLGTVGPNTPAVSFLDPSLTFTVPARQTAAGSMDILSHLLEQYFDRSKNNDASKGMIEGLMRTVIKWAPIALKQPDNYDARANLMWSATMALNGIVSVANENGWTVHSLEHELSAYYDITHGVGLGILTPRWMSFILTKDATTAEMLAQFGRHVWDLEGDESYAVAQAAIDATFDWISRLGFPMTLPEVGIKDTQHFDAMATAAVANASLETRAYVPLSVEDVETIYQASMTDGLA

SEQ ID NO: 85 - DNA, 2604 bp, Lactobacillus plantarum
  CDS (1)..(2601): Lactobacillus plantarum WCFS1; gene lp_3662 encoding alcohol dehydrogenase
atgattaagacagaaaaaaatcaaacaagcaaagttactgacgaagttgatcaattagttcaacgttctaagaaagcattagctattttgaagtcatatacccaagcacaaatcgatgatttatgtgaaaaggttgcggttgccgcactggacaatcatatgaagttagccaagttggcggttgaggaaaccggtcggggtgttgttgaagataaggcgattaagaacatctacgccagcgaatatatctggaacagcatgcgccatgataagacagtcggcgtcattaaagaagacgatgaagagcaactaatggaaattgctgaaccagttggtatcgtagccggggttacacccgtaacgaatccaacttcaacaacggttttcaagacgttgatctcattaaaggggcgtaacacgatcgtctttggtttccatcctcaagctcagaaatgtagttctgcggctgctgatgtgatgcgggaagcgattaaagctgctggtggtccagctgatgctgttttatacatcgaacacccaagcattgaagcaaccgacgccttgatgcaccatacggatgttgcgacgatcttggctaccggtggtccaagtatggtgacagccgcttactcatcaggtaaaccagcactgggtgttggtcctggtaacggcccaacttatgttgaaaaaacagctgacattaagcaggcggttaacgacattgttttatcgaagacgtttgataatgggatgatttgtgcttctgaaaatagtgccattatcgacaaggaaatttatgctgaagttaaagctgaatttattcgtttgggttgctactacgttaaacctaaagatgtgcaagccttgagtgatgctgtcattgatcctaaccggcacacagttcgtggtccagttgctggtaaaacagcttatcaaatcgcacaaatggctggcttgaaagatgtcgctaaggactgccgggtcttgattgcggagattaatggtgtcggtatcaagtacccattatccggcgaaaaattatcaccagttctgaccgtttacaaagcggattcgcatgaagcggcgttcaaacgggctaatgaattacttcactatggtggcttaggccatactgctgggattcatacgaccgatgatgcattggtcaaagaatttggcttacaaatgccagcttgccggatcttagttaacacgccatcttcagttggtgggttaggtaacatctacaataacatggcgccttcattaactctgggcacgggatcatatggtggcaactcgatttctcataacgttacagatatggatctgattaatatcaaaactgtggcaaaacggcgtaataacatgcaatgggtcaaaatgcctcccaaagtctacttcgaacgcaattccgttcgctacttggaacacatggccgggattaagaaggttttcctagtttgtgatcctgggatggttgaatttggctatgctgatcgagtaacggcggtcttgaacaagcggactgatccggttgatatcgacatcttctcagaagttgaaccgaacccgtcgactgacacagtctacaaaggggttgcccggatgaaggcctttaagccagatacaatcattgcactcggtggtggttctgcaatggacgccgctaaggggatgtggctcttctatgaacacccagaagcttccttcttaggtgctaaacagaagttcctggatatccggaagcggacgtacaaagtaccagtatccgaaaaagtaacttatattgggattccaacgacttctgggactggttctgaagtaacgccatacgcggttattacggactccaagacgcacgtcaaatacccgattacggactacgcaatgcaaccagatattgcgatcgttgacccacaatttgttgaaacggtgccaaagcggacgacggcttggactggtctcgacgtaattacccacgcaaccgaagcatatgtttcaacgatggcttctgacttcacacgcggctggtcaattcaagccttgcaattagccttcaagtacttgaaagcttcttatgatggtgacaagatggctcgtgagaagatgcacaatgcctcaacgttagctgggatggcctttgccaatgccttcttgggtatcaaccactcgatcgcccataaattaggcggggaattcaacttaccacacggattggcaattgcgatcacttatccgcaagtcgttcgttacaatgctgaaatcccaacgaagttagcaatgtggccgaagtacaaccataatactgccttagccgactatgccaacattgcccgggccttagggttaccaggcaagaccgacgaagaactcaaagaaagcttagttaaagcttacattgacttggctcactcaatggatgtgaccttatccttgaaagctaaccgggtcgaaaagaagcactttgacgccaccgtcgacgaattagccgaactggcctatgaagaccaatgcacgaccgctaacccacgcgaacctttaatcagtgaattaaaggcgattattgaacgtgaatgggacggccaaggtactgaaaaatag

SEQ ID NO: 86 - protein, 867 aa, Lactobacillus plantarum
MIKTEKNQTSKVTDEVDQLVQRSKKALAILKSYTQAQIDDLCEKVAVAALDNHMKLAKLAVEETGRGVVEDKAIKNIYASEYIWNSMRHDKTVGVIKEDDEEQLMEIAEPVGIVAGVTPVTNPTSTTVFKTLISLKGRNTIVFGFHPQAQKCSSAAADVMREAIKAAGGPADAVLYIEHPSIEATDALMHHTDVATILATGGPSMVTAAYSSGKPALGVGPGNGPTYVEKTADIKQAVNDIVLSKTFDNGMICASENSAIIDKEIYAEVKAEFIRLGCYYVKPKDVQALSDAVIDPNRHTVRGPVAGKTAYQIAQMAGLKDVAKDCRVLIAEINGVGIKYPLSGEKLSPVLTVYKADSHEAAFKRANELLHYGGLGHTAGIHTTDDALVKEFGLQMPACRILVNTPSSVGGLGNIYNNMAPSLTLGTGSYGGNSISHNVTDMDLINIKTVAKRRNNMQWVKMPPKVYFERNSVRYLEHMAGIKKVFLVCDPGMVEFGYADRVTAVLNKRTDPVDIDIFSEVEPNPSTDTVYKGVARMKAFKPDTIIALGGGSAMDAAKGMWLFYEHPEASFLGAKQKFLDIRKRTYKVPVSEKVTYIGIPTTSGTGSEVTPYAVITDSKTHVKYPITDYAMQPDIAIVDPQFVETVPKRTTAWTGLDVITHATEAYVSTMASDFTRGWSIQALQLAFKYLKASYDGDKMAREKMHNASTLAGMAFANAFLGINHSIAHKLGGEFNLPHGLAIAITYPQVVRYNAEIPTKLAMWPKYNHNTALADYANIARALGLPGKTDEELKESLVKAYIDLAHSMDVTLSLKANRVEKKHFDATVDELAELAYEDQCTTANPREPLISELKAIIEREWDGQGTEK

SEQ ID NO: 87 - DNA, 2703 bp, Leuconostoc mesenteroides
  CDS (1)..(2700): Leuconostoc mesenteroides subsp. mesenteroides ATCC 8293; gene LEUM_0146 encoding alcohol dehydrogenase
atggcagaagcaattgcaaagaaacccgcaaaaagggttttgacccctgaagaaaaagcggaattacaaacacaagctgagaagatgactgaggtattgattgaaaaatcacaaaaggcattgtctgaattttcaacattttcgcaagaacaagttgataaaattgttgcagctatggccttggcaggttctgagaattcacttctgttagcccatgctgctcacgacgagactggacgtggggttgtggaagataaggatacgaaaaatcgtttcgcctcagaatcagtttataacgctattaagtttgataagactgtgggtgttattagtgaagacaagattcaaggtaaggtagaattagcagccccacttggtattttggctggaatcgtcccaacgacaaatccaacgtcgacaactattttcaaatcaatgttgacagcaaagacacgtaacacaattatctttgctttccatccccaggctcaaaaagcatcggttcttgctgcaaaaattgtttatgatgctgctgttaaagcaggcgcaccggaaaactttatccaatggattgaaaagccttcactttatgcaacaagtgcgctgatacaaaatcctcacattgcttcaattctagctactggtgggccatcaatggttaatgcagctttgaagtcaggaaatccatccatgggtgtcggtgctggaaacggtgcagtttatattgatgcaactgttgacacagatcgtgccgtgtccgatttgttgttatcaaagcgtttcgataatggcatgatttgtgccacagaaaactcagccgttattcaagcaccaatctatgacgaaattttaactaagttacaagaacaaggtgcataccttgttcctaagaaagactacaaaaaaattgctgattatgtatttaagcctaacgcagagggatttggtattgctggtcctgttgctggtatgtcaggacgttggattgctgagcaagcaggcgtaaagattcctgatggtaaagatgtacttttgttcgaattagatcagaagaacataggtgaagcgttatcttctgaaaagttatcgccattactttcaatttataaagttgagaagcgtgaagaagctattgagactgttcaatccttgttaaactatcaaggcgcggggcacaacgcagcaattcaaattggttcacaagatgatccattcattaaagagtatgctgacgctattggtgcatcacgtattttggttaaccaacctgactcaatcggtggtgttggagatatttacacagatgctatgcgtccatcgttgacacttggtaccggatcatgggggaagaattcattgtctcataacttatcaacatacgacttacttaatattaagaccgtggctcgccgccgtaatcgtcctcaatgggttcgtttacctaaggaagtttactacgaagccaatgccattacttacttacaagacttgcctactataaaccgtgcatttattgtcgctgatcctggtatggttcagttcggatttgttggcagagtactaggtcaacttgagttacgtcaagaacaggttgaaacaaatatctatggttcagttaagcctgacccaactttgtcacaagctgttgaaattgctcgccaaatggcagacttcaaaccagatacagttattttacttggcggtggttcggcacttgacgctggtaaaattggtcggttcttgtacgaatactcgacacgccatgaaggaattttagaagatgacgaggcgattaaagatctattcttagaactacaacaaaagtttatggatattcgtaagcgaatcgttaagttttaccacgcacgtttgacacaaatggttgcgattccaacaacttcaggtactggatcagaagtcacaccatttgccgttattacagatgatgaaacacatgtaaagtatccactagccgattatgaattgacaccggaagttgctattgttgatccagaatttgttatgaccgtaccacaacacacggtatcttggtcaggattagatgctttgtcacatgctttggaatcgtatgtctcagtgatggcttctgaattcacacgtccttgggcattacaagctattaagttgatttttgataacttaacaaattcatacaattatgatcctaaacacccaactaaggaaggtcagaatgcacgcacaaagatgcactatgcgtcaacattggctggtatgtcatttgcgaatgccttcttgggacttaaccactcactagcacacaaaactggtggagaattcggactacctcacggtatggcaatcgctattgcaatgccacatgtgattaagtttaatgcggtaacaggaaatgtaaagcgcacaccatacccacgttacgaaacctatacagcacaaaaagattatgctgatattgcacgttacttaggtttgaaaggtgaaacagatgctgaattggtcgatgtattgattgcagaaatcaagaagttggctgcatcagtgggtgtcaatcaaacactatctggcaacggtgtttcaaagcatgactttgatacaaagttagaaaagatgattgacttagtttacaatgaccaatgcacgccgggaaaccctcgccaaccaagcttggcagaaattcgtcaattgttgaaagatcagttttaa

SEQ ID NO: 88 - protein, 900 aa, Leuconostoc mesenteroides
MAEAIAKKPAKRVLTPEEKAELQTQAEKMTEVLIEKSQKALSEFSTFSQEQVDKIVAAMALAGSENSLLLAHAAHDETGRGVVEDKDTKNRFASESVYNAIKFDKTVGVISEDKIQGKVELAAPLGILAGIVPTTNPTSTTIFKSMLTAKTRNTIIFAFHPQAQKASVLAAKIVYDAAVKAGAPENFIQWIEKPSLYATSALIQNPHIASILATGGPSMVNAALKSGNPSMGVGAGNGAVYIDATVDTDRAVSDLLLSKRFDNGMICATENSAVIQAPIYDEILTKLQEQGAYLVPKKDYKKIADYVFKPNAEGFGIAGPVAGMSGRWIAEQAGVKIPDGKDVLLFELDQKNIGEALSSEKLSPLLSIYKVEKREEAIETVQSLLNYQGAGHNAAIQIGSQDDPFIKEYADAIGASRILVNQPDSIGGVGDIYTDAMRPSLTLGTGSWGKNSLSHNLSTYDLLNIKTVARRRNRPQWVRLPKEVYYEANAITYLQDLPTINRAFIVADPGMVQFGFVGRVLGQLELRQEQVETNIYGSVKPDPTLSQAVEIARQMADFKPDTVILLGGGSALDAGKIGRFLYEYSTRHEGILEDDEAIKDLFLELQQKFMDIRKRIVKFYHARLTQMVAIPTTSGTGSEVTPFAVITDDETHVKYPLADYELTPEVAIVDPEFVMTVPQHTVSWSGLDALSHALESYVSVMASEFTRPWALQAIKLIFDNLTNSYNYDPKHPTKEGQNARTKMHYASTLAGMSFANAFLGLNHSLAHKTGGEFGLPHGMAIAIAMPHVIKFNAVTGNVKRTPYPRYETYTAQKDYADIARYLGLKGETDAELVDVLIAEIKKLAASVGVNQTLSGNGVSKHDFDTKLEKMIDLVYNDQCTPGNPRQPSLAEIRQLLKDQF

SEQ ID NO: 89 - DNA, 927 bp, Streptococcus thermophilus
  CDS (1)..(924): Streptococcus thermophilus CNRZ1066; gene str0936 encoding alcohol dehydrogenase
  tRNA (1)..(3): Met inserted by tRNA at start codon (GTG) instead of Val
gtggatctgacctttggagttaccgtaatccggaaatggaagagggacatagaaaatagtggtcatgaggctatcggaattgtcgaagaagttggtgagcaagttactacggtaaaaccaggagactttgtcattgcacctttcacacatgggtgtggtcagtgtgatgcttgtcgagctggttttgacggctcttgtgataaccactcaggtaataactggtctgagggcgtgcaggctgagtatatccgtttccactttgccaactgggcccttgtcaaaattcttgggcaaccctcagattatagcgaaggcatgctcaagtcacttttgacacttgctgatgttatgccgacgggttaccatgctgcgcgtgtggctaatgtacaaaagggtgataaggttgtcgttatcggagatggggctgttggtcaatgtgctgtcattgcatctaagatgcgtggagcttctcaaattgtccttatgagccgtcacgaagatcgtcaaaagatggctttggagtcaggtgcgactgcggttgtagctgagcgtggcgaaaaaggcattgacaaagtccgtgaagtcctcgggggaggagcagatgcagctctcgaatgtgtcggtactgaagcagcagtagaacaagctcttggtgtcctccataacggtggtcgtatgggatttgtcggtgtgcctcattataataaccgttcccttggttcgacctttgcccaaaatattttagtggcgggaggggtagcctctgtcacaacctatgataaacaagttttgttaaaagctgttcttgatggcgacatcaatccaggccgagtctttacgacaagttataaattggaagatattaatcaggcttataaagatatggatgaacgcaagtctattaaatctatgattgttttagattag

SEQ ID NO: 90 - protein, 308 aa, Streptococcus thermophilus
VDLTFGVTVIRKWKRDIENSGHEAIGIVEEVGEQVTTVKPGDFVIAPFTHGCGQCDACRAGFDGSCDNHSGNNWSEGVQAEYIRFHFANWALVKILGQPSDYSEGMLKSLLTLADVMPTGYHAARVANVQKGDKVVVIGDGAVGQCAVIASKMRGASQIVLMSRHEDRQKMALESGATAVVAERGEKGIDKVREVLGGGADAALECVGTEAAVEQALGVLHNGGRMGFVGVPHYNNRSLGSTFAQNILVAGGVASVTTYDKQVLLKAVLDGDINPGRVFTTSYKLEDINQAYKDMDERKSIKSMIVLD

SEQ ID NO: 91 - DNA, 2697 bp, Oenococcus oeni
  CDS (1)..(2694): Oenococcus oeni PSU-1; gene OEOE_1248 encoding alcohol dehydrogenase
atggcagttgaaacgaagaagattactaaaaagatactgacttccgacgaacttaaagacaaaaaggagacagcaaaaaaatacattggagaattagtcgataaatcaagacaggcattattagaattctctcaatatagtcaatcacaagttgacaaaattgttgccgcaatggctttagccggttccgaacattctttggaattagcacactttgctcgaaatgaaactggaagaggagttgttgaagacaaagatacgaaaaatcgttttgcctcggaatctgtatataacacgattaaaaatgacaaaacagttggcgtaattgatgaagacccaatcactggcaaagttcagttagctgcaccacttgggattttagccggaattgttccaacgacaaatccaacgtctaccacgatttttaaatcattgttaaccgctaagacacgtaatacgatcatttttgcttttcacccgcaagcacaaaaatcgtctgtagcggctgcgaaaattgtttaccaggcggctagaaaagctggagcaccgaaagatttcattcagtggatcgaaacgccttccttggaaaatacgactgctttgatgcaaaatcctgaaatagcttcaattttggctactggaggcccttctatggttcatgccgcattaacatcgggaaacccttcaatgggtgttggggcaggaaatggagctgttttcattgaccatacggctcgtgttcgtcgagcggcagaagacttgttgctatcaaaacgttttgataatggaatgatttgcgctacagagaattccgcagttatcgaagcttcggtttatgacgaatttatgaaattaatgcaggaaaagggtacttatctcgttccgaaggatgattacaaaaagatcgctgattttgttttcagcgataaacatgcagttaatggtccggttgccgggatgagtggccgttggattgctgaacatgccggtgttactttgccgaagggcaaagatgttttgttgtttgagttggatcaagacgacattggcgaaaaactttcctcggaaaaacttagccccttgctttcggtctataaagctgctgatcgtaaagaagcgataaaagttgttcaaagacttttgaactatcaaggagctggtcataatgcggcaatccagattggcgctcaagacgatccctttgttaaagaatatgccgatgcagtttctgcatctagaattttggttaaccagcccgattcaataggtggagtcggcgatatttatacagatgcattgcgtccaagtatgacgcttggtactggttcatgggggaagaattcattgtcacataatttatcaacttacgatttgttgaatgtcaaaacggttgcccgcagacgtaatcgtcctcaatgggttcgtcttccaaaagatatctactatgagaaaaatgccattacctatctgcaggaattaccgaacgtcaatcgggctttcgttattaccgatcattcgttggtcaaatatggattcgtcgatcggattcttgagcaattcgaattgcgtcccgaccaggttaaaacaagtatttacagttctgttcaaccggatccttatttgagtcaggctgttgaaattgcaaaacaaatgcaggagttcgaaccggatacagtaattgctcttggaggaggttcctctttggatgttgccaagatttcccgttttctttatgaatattctcaagaaccggaccacattggttttttggaaaacattgacgatattaaagaattgtttaaaggattgcagcaaaagtttatggatattcggaaacggattgttaaattcgaacatcagaatttgactcaactggttgctattccaacaacttcgggtaccggttcggaagtaacaccgttttcggttatcaccgatgatgaaactcacgttaaataccctttggccgattatgaattaactccgcaagttgcaatcgttgatcctgaattggttatgactgtaccaaaacggaccctggcttggtctggactggacgccttatctcactcgcttgaatcctacgtgtcggttatgagttctgaatttacacggccgtgggctttacaggcaatcaaactgatttttgaaaacatcgttgattcctataattacgatccaaagcacccaactaatcggggcgccgaggcacgtgaaaaaatgcattatgctgcaactttggccggcatgtctttcggaaacgccttcttgggtataaaccattcactggcccataaaaccggtggagagttcggtcttcctcatggtttggcaatcagcatcgcgatgccacatgtaattcgatttaatgcggttaccggaaacgtcaaacggactccttttcctcgttatgaggtttatacagcccaaaaagattatgccgatattgcgcgccatattggcctcagcggtaagaacgatgccgaattggttgaaaaacttatcgccaaaatcaaggaattaaccgatgccttggatgtcaatattactttgagcggcaatggagtcgataaaaagagctttgaacattctttggatcaactggttgatcttgtttacgatgaccagtgcacgccaggaaatccgcgacaaccgaatttagctgaaattaggcagttattgatcgaccaattttaa

SEQ ID NO: 92 - protein, 898 aa, Oenococcus oeni
MAVETKKITKKILTSDELKDKKETAKKYIGELVDKSRQALLEFSQYSQSQVDKIVAAMALAGSEHSLELAHFARNETGRGVVEDKDTKNRFASESVYNTIKNDKTVGVIDEDPITGKVQLAAPLGILAGIVPTTNPTSTTIFKSLLTAKTRNTIIFAFHPQAQKSSVAAAKIVYQAARKAGAPKDFIQWIETPSLENTTALMQNPEIASILATGGPSMVHAALTSGNPSMGVGAGNGAVFIDHTARVRRAAEDLLLSKRFDNGMICATENSAVIEASVYDEFMKLMQEKGTYLVPKDDYKKIADFVFSDKHAVNGPVAGMSGRWIAEHAGVTLPKGKDVLLFELDQDDIGEKLSSEKLSPLLSVYKAADRKEAIKVVQRLLNYQGAGHNAAIQIGAQDDPFVKEYADAVSASRILVNQPDSIGGVGDIYTDALRPSMTLGTGSWGKNSLSHNLSTYDLLNVKTVARRRNRPQWVRLPKDIYYEKNAITYLQELPNVNRAFVITDHSLVKYGFVDRILEQFELRPDQVKTSIYSSVQPDPYLSQAVEIAKQMQEFEPDTVIALGGGSSLDVAKISRFLYEYSQEPDHIGFLENIDDIKELFKGLQQKFMDIRKRIVKFEHQNLTQLVAIPTTSGTGSEVTPFSVITDDETHVKYPLADYELTPQVAIVDPELVMTVPKRTLAWSGLDALSHSLESYVSVMSSEFTRPWALQAIKLIFENIVDSYNYDPKHPTNRGAEAREKMHYAATLAGMSFGNAFLGINHSLAHKTGGEFGLPHGLAISIAMPHVIRFNAVTGNVKRTPFPRYEVYTAQKDYADIARHIGLSGKNDAELVEKLIAKIKELTDALDVNITLSGNGVDKKSFEHSLDQLVDLVYDDQCTPGNPRQPNLAEIRQLLIDQF

SEQ ID NO: 93 - DNA, 2613 bp, Bacillus coagulans
  CDS (1)..(2610): Bacillus coagulans 36D1; gene Bcoa_0619 encoding alcohol dehydrogenase
atggcaatcgatgaaaaagttgttggcaaatctgcgcaaatcacggaaatggtcgattccctcgtcgcaaaagggcaaaaagcactgcgtgaatttatggaactggatcaggcacaagtggacaatatcgtaaaacaaatggcacttgccgggttggaacagcatatggtgctcgccaaaatggccgtggaagaaacagggcgcggcgtatatgaagacaaaatgacaaaaaacttgtttgcaacagaatacatctatcacaacattaaatataacaaaacagtcggcatcattgacgaaaacaataatgaagggattgttaaatttgcggaaccggtcggcgtgattgccggggtcactcctgtaacaaacccgacatcaaccacgatgtttaaagcattaattgccattaaaacacgcaacccaattattttcgcgttccatccgtccgcacaaaaatgcagcagccatgccgcaaaagtgatgcttgacgctgctgtgaaagccggcgccccggaaaactgcatccaatggatcgaaaaaccggccattgaagcgacacagcaattgatgaaccattcgggtatttcactgattcttgcaacgggcggttccggcatggtaaagtccgcatattcgagcgggaaacctgcgcttggcgtcgggccgggaaacgtcccttgctatattgaaaaatctgctgatatcaaacgcgccgtcaatgatttgattttgtccaaaacgtttgacaacggcatgatctgtgcgtcggaacaggctgtcatcatcgacaaagaaatttatgacaatgtgaaaaacgaattgattgcaaatcaatgctacttcctgaatgaagcggagaagaaaaaggttgagaaaaccgtcatcaatgaaaagacgcaatccgtcaacagcgccattgtcggcaaaccggcctatgaaattgcgaaaatggcaggcgtaaatgttccggaagataccaaaattttaatcgccgaacttacaggtgtcggcccggactacccgctttccagagaaaaattaagcccggttttggcctgttacaaagccaacagcacaaaacaaggtttcgaatttgcagaagccatgctcgaattcggcggacttggtcactcggctgtgatccattcgacaaacgatgaagtcattgaacaatacggcttaaaaatgaaagccggccggatcattgtcaactccccgtcttcgcaaggggcaatcggcgacatttacaatgcctacatgccttctttgacactcggctgcggcacgtttggcggcaactcggtgtccacaaacgtcggtgtcatcaatctttacaatgtaaaaacaatggcgaaacggagagtcaatatgcaatggtttaaaattccaccgcgcgtgtattttgaaaagaactcggtccaatacctggaaaaaatgccggatatctcaagtgcctttattgtcaccgatccggatatggtcaggcttggattcgttgagaaagtactgtattacttgcggaaacgcccggactatgtgcactgtgaaattttctcagaagtcgaaccggatccgtctattgaaacggttcggaaaggtgccgcagctatggcaagcttccagccggatgtcattatcgcgcttggcggcgggtcggcgatggatgctgcaaaaggcatgtggctgttctatgagcatccggaagttgatttcaacgaattgaagcaaaaatttatggacatccggaaacgggttgccaaattcccgaaactgggtgaaaaagcgcagctggtctgcattccgaccacatcgggcaccggttctgaagtgacttctttcgccgtcatttcggataaaaagaacaacacaaaatatccgctcgcagactatgaactgacaccggatgttgcgatcattgacccgcagtttgttatgaccgttccgaaatccgtaacagccgataccgggatggacgttttgacccatgcgattgaagcctatgtatccaacatggccaacgactatacggacggcctggcaattaaggccatccagcttgttcacgaatacttgccgaaagcatacgcaaatggcaatgatgcactggcacgcgaaaaaatgcacaatgcatcgactttggcagggatggcgttctcgaatgcattccttggcatcaaccattcacttgcccataaaatcggcgctgaattccatattccgcacggccgggctaacgcgattctgttgccgcatgtcatccgctataacgcgcaaaagccgaaaaaatttgcggcattcccgaaatacgaacattttattgcggatcaacgctacgcggaaatcgcgcgcgtacttggtcttccggcaagcacgacagaagaaggtgtcgaaagcctttgccaggaaatcatccggatgtgcaaactgttcaatattccgcttagcctaaaagcagccggcgtgaaccgggcggactttgaaaaacgggttgccattattgcagaccgcgcatttgaagaccaatgcacacctgcaaaccctaaattgccgcttgtcagcgaattggaagacattttacgcaaagcttttgaaggcgttgaagcaaaataa

SEQ ID NO: 94 - protein, 870 aa, Bacillus coagulans
MAIDEKVVGKSAQITEMVDSLVAKGQKALREFMELDQAQVDNIVKQMALAGLEQHMVLAKMAVEETGRGVYEDKMTKNLFATEYIYHNIKYNKTVGIIDENNNEGIVKFAEPVGVIAGVTPVTNPTSTTMFKALIAIKTRNPIIFAFHPSAQKCSSHAAKVMLDAAVKAGAPENCIQWIEKPAIEATQQLMNHSGISLILATGGSGMVKSAYSSGKPALGVGPGNVPCYIEKSADIKRAVNDLILSKTFDNGMICASEQAVIIDKEIYDNVKNELIANQCYFLNEAEKKKVEKTVINEKTQSVNSAIVGKPAYEIAKMAGVNVPEDTKILIAELTGVGPDYPLSREKLSPVLACYKANSTKQGFEFAEAMLEFGGLGHSAVIHSTNDEVIEQYGLKMKAGRIIVNSPSSQGAIGDIYNAYMPSLTLGCGTFGGNSVSTNVGVINLYNVKTMAKRRVNMQWFKIPPRVYFEKNSVQYLEKMPDISSAFIVTDPDMVRLGFVEKVLYYLRKRPDYVHCEIFSEVEPDPSIETVRKGAAAMASFQPDVIIALGGGSAMDAAKGMWLFYEHPEVDFNELKQKFMDIRKRVAKFPKLGEKAQLVCIPTTSGTGSEVTSFAVISDKKNNTKYPLADYELTPDVAIIDPQFVMTVPKSVTADTGMDVLTHAIEAYVSNMANDYTDGLAIKAIQLVHEYLPKAYANGNDALAREKMHNASTLAGMAFSNAFLGINHSLAHKIGAEFHIPHGRANAILLPHVIRYNAQKPKKFAAFPKYEHFIADQRYAEIARVLGLPASTTEEGVESLCQEIIRMCKLFNIPLSLKAAGVNRADFEKRVAIIADRAFEDQCTPANPKLPLVSELEDILRKAFEGVEAK

SEQ ID NO: 95 - DNA, 711 bp, Lactococcus lactis
  CDS (1)..(708): Lactococcus lactis subsp. cremoris MG1363; gene llmg_1275 encoding a-acetolactate decarboxylase
atgtcagaaatcacacaactttttcaatataatacccttggggcattaatggccggactttatgaggggacaatgacgattggtgagctcttgaaacatggtgacttaggaattggaactttagattcaattgatggtgaattgattgttttagatggtaaagcttatcaagctaagggagataaaacgatcgtcgaattaactgacgatatcaaagttccttatgctgcagttgttcctcatcaggcagaagttgttttcaaacaaaaatttacagtaagcgataaagaattggaagaccgaattgaaagctattttgatggtcaaaacttattccgctcaatcaaaattactggtaaatttccaaaaatgcatgtacgaatgattccgcgtgctaaatcaggaacaaaatttgtagaagtttcacaaaaccaaccagaatataccgaagaaaatatcaaaggaacaattgttggaatttggactcctgaaatgttccatggtgtcagcgttgctggttatcatcttcattttattagtgaagatttcacttttggtggacatgttcttgattttattattgataatgggactgttgaaattggagcaattgaccaattgaatcaatcattccctgttcaagatcgcaaatttttatttgccgaccttgacattgaggctttgaaaaaagatattgatgtagctgaatga

SEQ ID NO: 96 - protein, 236 aa, Lactococcus lactis
MSEITQLFQYNTLGALMAGLYEGTMTIGELLKHGDLGIGTLDSIDGELIVLDGKAYQAKGDKTIVELTDDIKVPYAAVVPHQAEVVFKQKFTVSDKELEDRIESYFDGQNLFRSIKITGKFPKMHVRMIPRAKSGTKFVEVSQNQPEYTEENIKGTIVGIWTPEMFHGVSVAGYHLHFISEDFTFGGHVLDFIIDNGTVEIGAIDQLNQSFPVQDRKFLFADLDIEALKKDIDVAE

SEQ ID NO: 97 - DNA, 711 bp, Lactobacillus casei
  CDS (1)..(708): Lactobacillus casei ATCC 334; gene LSEI_1840 encoding a-acetolactate decarboxylase
  misc_feature (1)..(3): Met inserted by tRNA at start codon (GTG) instead of Val
gtgaatactgatcggttatatcaacatggcacattggcaatgcttgtacccggattgtttgctggtacgcaaaagattgaagaactgctgcagcatggcaatactggtattggcactttgacggcgctagatggcgaacttgtgatcattgatagcaaagtttatcaagtcaatgcacaaggcgctgttcgcgaagtcgggtcagaagaagaagtaccgtttgcaaacgtgcattatcaagctgataaatctgtaggcaaactacaaggacttgatttgtcaggctttcaaaaaacggttttggaacgccttcaaacggccaatctttttgctgcagtacgcgttgaggggcggtttacgcagatgcatacacgcgcggtgttgccacaacagccaccgtatccaacgcttactgaaacagcttcaggtcaaaaagaattcaacgctgagaatatcaagggtacattgattgggtattattcgcctgatctctatgcgggtgcggtgtcaccggggttccacttgcattttcttgacgctgatcatcacatgggtggccatattcttggcttcgaactcgacagtggcgaattgtttctgcaaaagtttagtgacttccagctacatctgccgacaaccaacgatgcttttttaaagcaaaaatttgacacggcaacactggtagccgatattcgcaaggctgagaattga

SEQ ID NO: 98 - protein, 236 aa, Lactobacillus casei
VNTDRLYQHGTLAMLVPGLFAGTQKIEELLQHGNTGIGTLTALDGELVIIDSKVYQVNAQGAVREVGSEEEVPFANVHYQADKSVGKLQGLDLSGFQKTVLERLQTANLFAAVRVEGRFTQMHTRAVLPQQPPYPTLTETASGQKEFNAENIKGTLIGYYSPDLYAGAVSPGFHLHFLDADHHMGGHILGFELDSGELFLQKFSDFQLHLPTTNDAFLKQKFDTATLVADIRKAEN

SEQ ID NO: 99 - DNA, 711 bp, Lactobacillus plantarum
  CDS (1)..(708): Lactobacillus plantarum WCFS1; gene lp_2030 encoding a-acetolactate decarboxylase
atggacacaacaacaatttttcaacacggcacattaggcttacttgttcccggcttatttgacgggacgattacggctggtgaactcttaacccatggtgatacgggtattgggacgttagacggtctcaatggtgaagtgattattctaggaggtcacgcctatcaagcacgtgaggatggtcaaattcgtgaaattcagcccgaagagacgttaccatttgcatcggtgcactttgaaaagcctgatattagtgcgcaattagctgcaatcacacaaactgattttgagcaacaagtggttcatgactatcgtttgaccaacgtgtttgcagctattcgcgtcgatgggacctttgcaaaagtcaagacgcgagtcgcgcctcgtcaggaaccaccgtacaaaacattagtcgcggcaacggcaacacaaccggaattcaccggtgaacatgttgacggaacgattattggctactacgcaccgcatttgttccaaggcgctacggtcggtggctttcacttacactttctaagtaaagaccatcaattaggtggacacttgctggggtttgaagtcgaacaagcgacgctgaaagttcaacattttgctgactttcatgtgcacttgccaatcgacaatgaagcgtacttacaagaacaatttgataatgaagccattgatcatgccattaataaagctgagcgttga

SEQ ID NO: 100 - protein, 236 aa, Lactobacillus plantarum
MDTTTIFQHGTLGLLVPGLFDGTITAGELLTHGDTGIGTLDGLNGEVIILGGHAYQAREDGQIREIQPEETLPFASVHFEKPDISAQLAAITQTDFEQQVVHDYRLTNVFAAIRVDGTFAKVKTRVAPRQEPPYKTLVAATATQPEFTGEHVDGTIIGYYAPHLFQGATVGGFHLHFLSKDHQLGGHLLGFEVEQATLKVQHFADFHVHLPIDNEAYLQEQFDNEAIDHAINKAER

SEQ ID NO: 101 - DNA, 705 bp, Pediococcus pentosaceus
  CDS (1)..(702): Pediococcus pentosaceus ATCC 25745; gene PEPE_0406 encoding a-acetolactate decarboxylase
atggcaaaattatttcaacatgggacgctcgcaatgctagtagatggactttttggtgggacgcttgcggtttccgatttactgaagcacggtgactttggaatcggaactgctgaaggccttaatggcgaattaattattttagatggagccccttaccaagcgctagcagacggtacaattagggttattggtgatgatgaactattaccgtttgctaacgttaattcagcggattttgaaggacgagcagtgttatctgacattgagatgaaagatgtggatgcgacacttgctaaagaattgtcatatcaaaatacatttgttgctattaaaattagtggaactttccgtacagttcaaactcgggtggtaaagcaacaagaacgtccttatccaacccttagtgaaacagcatctaaacaacaagtttttaatgctgaagatgttagaggaacagtagttggctactacaccccagatcttttccatggtgcgggagtagcggggatgcatcttcattttattgacgatcaacacgaattcggaggtcatttactagactttaaggcggatcaagttaaactttcttggcaactattagacggtttagacctcaatttaccaattcaagacgcagaatttatggcacatgaggctagcgacgcggaaaaaattcaacaatcaatttctgagtctgaataa

SEQ ID NO: 102 - protein, 234 aa, Pediococcus pentosaceus
MAKLFQHGTLAMLVDGLFGGTLAVSDLLKHGDFGIGTAEGLNGELIILDGAPYQALADGTIRVIGDDELLPFANVNSADFEGRAVLSDIEMKDVDATLAKELSYQNTFVAIKISGTFRTVQTRVVKQQERPYPTLSETASKQQVFNAEDVRGTVVGYYTPDLFHGAGVAGMHLHFIDDQHEFGGHLLDFKADQVKLSWQLLDGLDLNLPIQDAEFMAHEASDAEKIQQSISESE

SEQ ID NO: 103 - DNA, 720 bp, Leuconostoc mesenteroides
  CDS (1)..(717): Leuconostoc mesenteroides subsp. mesenteroides ATCC 8293; gene LEUM_0549 encoding  a-acetolactate decarboxylase
atgacaacaatatatcaacatggtacattagcacaattagtagcgcgccaaatgtcagggacaataacagtcgctgaaatgttggaacatggggacactggcattggtacttttgagggcctcaatggtgaagctatttttctaaacggggaagcctatcaagctgatagtacaggaaaagttcaccacattactgataaacaaactacattaccttttgcatcaatccattttgatcaaccggaggcaagccaaaaattaccttttaaaaaaataaaatatagtaatttgactcagaacttgaaagatgagcagttatttaacgttttctctgccttaaaactgcatggtgagtttgcccacgttcacgttcgtattgtaacaaaacaagagaagccatatccaagtttgttacaagtagctgaacagcagcctgaattcaaagcagacaacataactggtacattagttggatattatgcaccaaaagtttttggcggtccaaccgcagcagggtggcatttacactttttgtcagatgatttaacctttgctgggcacgttttggattttgaagcaacagatgtcgatggtactttagaagtttttgataactttttgcaacatctacctattaataatgctgactttagaagcatgaatcaggatatagctggtttggataaagccattgaggccagtgaaggcggaaaaaattag

SEQ ID NO: 104 - protein, 239 aa, Leuconostoc mesenteroides
MTTIYQHGTLAQLVARQMSGTITVAEMLEHGDTGIGTFEGLNGEAIFLNGEAYQADSTGKVHHITDKQTTLPFASIHFDQPEASQKLPFKKIKYSNLTQNLKDEQLFNVFSALKLHGEFAHVHVRIVTKQEKPYPSLLQVAEQQPEFKADNITGTLVGYYAPKVFGGPTAAGWHLHFLSDDLTFAGHVLDFEATDVDGTLEVFDNFLQHLPINNADFRSMNQDIAGLDKAIEASEGGKN

SEQ ID NO: 105 - DNA, 711 bp, Leuconostoc mesenteroides
  CDS (1)..(708): Leuconostoc mesenteroides subsp. mesenteroides ATCC 8293; gene LEUM_0954 encoding a-acetolactate decarboxylase
atgtctacaatttatcaacatggaacgttagaattaattatgtcaggattatatgacggtacggcaccgttgtcgtcaatattgaatcatggttcgagtggcattggaacaatggatgaacttgatggtgaagttacaatcatagaaaatagcgtatatcaaacgaaagcgaatggtgtaactaaaggaatcacagatttatcgttggaaacaccttttacttccatccattctcaatcagagttatactattttcttcaagaaaaatttttaacttttgatagtttaaacaatatatccaaacaacatcagagctgggctaatttaccagctagtattcaaataaatgctagtttttcgaaactgaaggttcgtgttgctcctaagcaaatgaagccttatccacccttcgttgatgtaacattgaaacaaccagtgtttaattatgaaaatgtttctggtactttaattggtgattttggtcctgacctttattctggcattatggcgagtgggtggcatcttcattttttaagtgatgatcgtacgattggcggccatgttcttgatttcaaggcgagcgatgtattaggtagaattgatttattcaatgaactcaacatcgctttgcctactgataatcctgatttcaataatcatgaagccgacatattgaatattcgtgaagccatcgatgtagcagaaagataa

SEQ ID NO: 106 - protein, 236 aa, Leuconostoc mesenteroides
MSTIYQHGTLELIMSGLYDGTAPLSSILNHGSSGIGTMDELDGEVTIIENSVYQTKANGVTKGITDLSLETPFTSIHSQSELYYFLQEKFLTFDSLNNISKQHQSWANLPASIQINASFSKLKVRVAPKQMKPYPPFVDVTLKQPVFNYENVSGTLIGDFGPDLYSGIMASGWHLHFLSDDRTIGGHVLDFKASDVLGRIDLFNELNIALPTDNPDFNNHEADILNIREAIDVAER

SEQ ID NO: 107 - DNA, 720 bp, Streptococcus thermophilus
  CDS (1)..(717): Streptococcus thermophilus CNRZ1066; gene str0924 encoding a-acetolactate decarboxylase
atgtctgaagccataaaattatttcaatataatactttgggagccttgatggctgggctttatggaggtactttaaccgttggagagttgttagagcatggagacttgggtctcggaacattagattctatcgatggtgagttgattgttcttgacggtaaagcctatcaagctaaaggctctgaaggtaaagtcgaagtggtagaagtttctcctgatgaaaaagttccctatgcagcagtcgtacctcaccaagctgaagttatcttccgtcaacgttatgaaatgactgataaagaacttgaggatcgtattgaatcatactatgatggggtcaatcttttccgttcaatcaaaatcaaaggtcattttaaacacatgcacgtgcgcatgattccaaaatcaaatgcggacattaagtttgctgatgttgccactcgccaacctgagtatgaggtagatgatatttcaggtacaatcgttggtatctggacacctgaaatgttccacggtgtgagtgttgctggttaccatctccattttatttcagatgacttgacattcggtggtcacgttatggattttgttatcgagaatggtattattgaagttggaccagttgaccaactcgatcaacgcttcccagttcaagaccgtcaatatctctttgctaaattcaatgttgatgaaatgcgtaaagatattactaaggctgaataa

SEQ ID NO: 108 - protein, 239 aa, Streptococcus thermophilus
MSEAIKLFQYNTLGALMAGLYGGTLTVGELLEHGDLGLGTLDSIDGELIVLDGKAYQAKGSEGKVEVVEVSPDEKVPYAAVVPHQAEVIFRQRYEMTDKELEDRIESYYDGVNLFRSIKIKGHFKHMHVRMIPKSNADIKFADVATRQPEYEVDDISGTIVGIWTPEMFHGVSVAGYHLHFISDDLTFGGHVMDFVIENGIIEVGPVDQLDQRFPVQDRQYLFAKFNVDEMRKDITKAE

SEQ ID NO: 109 - DNA, 717 bp, Oenococcus oeni
  CDS (1)..(714): Oenococcus oeni PSU-1; gene OEOE_1704 encoding a-acetolactate decarboxylase
atgaaagatttaacaaaagcttatcaacatggcactttggctcaaattatggatggccaatatgatgggacaatactgcttaaagatcttctcgaacacggcgatttcggtattggtacaacaaccggaatcggggtcgaattaatagttttggatggggtggcttatggaatccccagcagcggaaaagtccaaaaaatggacatcgagcacgaaaaagcaccctttgcaaatattaactacttcgatcaaaagttgaagagcgaaagcctaattaatcttgattccgatagttttcaaaaaagggttgaagaagaatataaacttaaaaatgtctttgccgcaattagagtacacggagaatttacaaatgttttggcgcgatcagccgataaacaagaaaaaccatacccgccattttcaaaggtcgcggcagcgcaacatgaattccatgctgattcactgacggcaacgatggttggctattattcagcagcgatgtatgaagggacaaccgcggccggctttcaccttcacattctctccgatgatcgtcaattcggagggcacctattagattttaaaatcaaaaaagccgacctccaggttcagatttttcaggatttccagttgcatctaccaattgaaaatcccgattttcgccgacgcgaattagacttggaaactttaaaaaaagcgattgaaaagacagaataa

SEQ ID NO: 110 - protein, 238 aa, Oenococcus oeni
MKDLTKAYQHGTLAQIMDGQYDGTILLKDLLEHGDFGIGTTTGIGVELIVLDGVAYGIPSSGKVQKMDIEHEKAPFANINYFDQKLKSESLINLDSDSFQKRVEEEYKLKNVFAAIRVHGEFTNVLARSADKQEKPYPPFSKVAAAQHEFHADSLTATMVGYYSAAMYEGTTAAGFHLHILSDDRQFGGHLLDFKIKKADLQVQIFQDFQLHLPIENPDFRRRELDLETLKKAIEKTE

SEQ ID NO: 111 - DNA, 750 bp, Bacillus coagulans
  CDS (1)..(747): Bacillus coagulans 36D1; gene Bcoa_2135 encoding a-acetolactate decarboxylase
atgcgtactgctgcagaaaatcaaaatacagagcaaattttaacaagccggaccgatgaagtataccaattgtccacgatgacatcgcttcttgacggcgtatacgaaagcgacaagacgtttgctgaattaaaaaagttcggcgatttcggcatcggcactttcaaccatttggacggggaattgattgcctttgacaatgcgttctatcagctgaaggacgggacggcaaaacgtgtacagcctgaagacaagtcaccgttttgctcgcttgcacatttttcggaggatatcacctatacagctgaaggtcctctagcaaaacccgaactggaagacttgatcaaagatctcgtccgcagcgaaaatttattttatgccattcgtgtggacggtgtttttaaaaaaatgaacacaagaaccgtctcctaccaggaaaaaccggttcccatgacggaagcggtgaaatcccagccggtttactcgtttgaaaatacaaaaggaacgctttctggtttttggacgccgatgtttgcacaaggaatcgcggtcgccggcttccacctccattttattgacgacaaacgcaccggcggcggccatgtctttgactatgtgcttgactacgggacgatccggatcagcaaaaaaacgcatatgcatctggaacttccggaaacagacgcttttttaaatgcgaacctttcccgcgccaatttggcagaggaactggaaaagacagaaggctga

SEQ ID NO: 112 - protein, 249 aa, Bacillus coagulans
MRTAAENQNTEQILTSRTDEVYQLSTMTSLLDGVYESDKTFAELKKFGDFGIGTFNHLDGELIAFDNAFYQLKDGTAKRVQPEDKSPFCSLAHFSEDITYTAEGPLAKPELEDLIKDLVRSENLFYAIRVDGVFKKMNTRTVSYQEKPVPMTEAVKSQPVYSFENTKGTLSGFWTPMFAQGIAVAGFHLHFIDDKRTGGGHVFDYVLDYGTIRISKKTHMHLELPETDAFLNANLSRANLAEELEKTEG

SEQ ID NO: 113 - DNA, 771 bp, Lactococcus lactis
  CDS (1)..(771): Lactococcus lactis subsp. cremoris MG1363; gene llmg_0339 encoding a diacetyl reductase
atggggaaattagcgattgtaacgggaagcggacaaggtattggggaaggtattgtctatcggttagcaaaagatggatttgcggttgccgtagcagatattaatcctcaaacagcaaaaaatgttgcaaaaactttgatagataaaggatttgaagctaaagcttacgtgcttgatgttgcgaaccgttcggcagtttttcagcttattgaacaagcggtgagtgattttggtgaacttgctgtatttgttaataatgctggggttgcttttattgatagcattatagattctgattcagaaagggttgaacgactatttgatgtcaatatcaaaggtacttattggggaatacaagcagcagctacccaatttaaaaaacaaggtcatggcggacgaattatcaatgcggcttcgcttgcaagtgttgaaggttctgccttgcaaagtgcttattctgcttcaaaatttgcaatacgtggattgacacagtcggcagcgaaagaacttgcaaaagactatatcacagtgaatgcttataatcctggaattgtacgcaccgctatgcgagatgagattgataaaaaaacggctcaaatcaaaggaattagcattgaacagcaacaacagaattgtttgaatgaaatctacctcggacgtgaaggaagaccagaagatgttgcagaagttgtggcctggtttgcttcagatgcagcagaatatattacaggacaatctatcttagtggatggcgggatgagattcaattag

SEQ ID NO: 114 - protein, 256 aa, Lactococcus lactis
MGKLAIVTGSGQGIGEGIVYRLAKDGFAVAVADINPQTAKNVAKTLIDKGFEAKAYVLDVANRSAVFQLIEQAVSDFGELAVFVNNAGVAFIDSIIDSDSERVERLFDVNIKGTYWGIQAAATQFKKQGHGGRIINAASLASVEGSALQSAYSASKFAIRGLTQSAAKELAKDYITVNAYNPGIVRTAMRDEIDKKTAQIKGISIEQQQQNCLNEIYLGREGRPEDVAEVVAWFASDAAEYITGQSILVDGGMRFN

SEQ ID NO: 115 - DNA, 762 bp, Lactococcus lactis
  CDS (1)..(759): Lactococcus lactis subsp. cremoris MG1363; gene llmg_1641 encoding acetoin reductase
atgtctaaagttgcagcagttactggcgcaggtcaaggaattggctttgctatcgcaaaacgtttatataatgatgggtttaaagtcgcaatcattgattacaatgaagaaacagctcaacaagcagctaaggaacttggtggcgaatcatttgctcttaaagcagatgtttctgaccgtgaccaagtagttgccgctttagaagctgttgttgaaaaatttggtgatttgaatgtagtagtaaataatgcaggaatcgccccaaccactccgattgaaacaattactcctgaacaatttcatcaagtttataatattaatgttggtggagttttgtggggaacacaggcagccacagcacttttccgtaaactaggtcatggtggtaagattattaatgcaacttcgcaagcaggtgtcgtagggaatcctaacctaatgctttattcttcttcaaaattcgctgttcgtggaatgacacaaattgccgctcgcgatctagcagaagaaggaattacagttaatgcctatgcaccagggattgttaaaacaccaatgatgtttgatattgcacatcaagtgggtaaaaatgcaggtaaagatgacgaatggggcatgcagacttttgccaaagatatcgcgatgaaacgtttgtcagagcctgaggacgtggccaatgtggtttctttccttgctggtcctgattctaattatattacgggtcaaacaattattgttgatggtggaatgcaatttcattaa

SEQ ID NO: 116 - protein, 253 aa, Lactococcus lactis
MSKVAAVTGAGQGIGFAIAKRLYNDGFKVAIIDYNEETAQQAAKELGGESFALKADVSDRDQVVAALEAVVEKFGDLNVVVNNAGIAPTTPIETITPEQFHQVYNINVGGVLWGTQAATALFRKLGHGGKIINATSQAGVVGNPNLMLYSSSKFAVRGMTQIAARDLAEEGITVNAYAPGIVKTPMMFDIAHQVGKNAGKDDEWGMQTFAKDIAMKRLSEPEDVANVVSFLAGPDSNYITGQTIIVDGGMQFH

SEQ ID NO: 117 - DNA, 780 bp, Pediococcus pentosaceus
  CDS (1)..(777): Pediococcus pentosaceus ATCC 25745; gene PEPE_0286 encoding acetoin reductase
atggcaaacaaaaccaaagttgcattagtaacgggagcaggacaaggaattggggcagcaattgcgacccgattggctaacgatggatttgcggtggcagtggcagatatgaatactgaaactgctaacaaagttgctgaaaaaattaatagcaatggtggaagggctcttccaatcgtggttaatgtagcagaacgtgataatgtgtttgaagccgttaggactacgattcaggaactaggtggacttgatgtgttggtcaataatgccggcctaggacctaccacaccaattgatacaattacaccagaacaatttgataaagtttatcacgttaatgtaggtggagtactttggggaattcaagcagcaacggaagcatttaagaaattaggacatggtggaaaaatcatcaatgcgacttctcaagccggagttgttggaaaccctaatttggccctttactcagggactaagtttgctgtccgaggaattactcaagtagcagcacgtgatttggcggattttggtattacagttaatgcttatgcaccgggaattgtacgaactccgatgatgatggatatcgcacatgaagttggacaaaatgctggtaaagatgacgaatggggtatgcaacagtttgctaaagacattaccttaaaacgtttgtcagaaccagaagatgtggcagctgcagtatcattcttagcaggaccagattcaaattatgtaactggacaaacaattattgtagatggtggaatgcaatttcattaa

SEQ ID NO: 118 - protein, 259 aa, Pediococcus pentosaceus
MANKTKVALVTGAGQGIGAAIATRLANDGFAVAVADMNTETANKVAEKINSNGGRALPIVVNVAERDNVFEAVRTTIQELGGLDVLVNNAGLGPTTPIDTITPEQFDKVYHVNVGGVLWGIQAATEAFKKLGHGGKIINATSQAGVVGNPNLALYSGTKFAVRGITQVAARDLADFGITVNAYAPGIVRTPMMMDIAHEVGQNAGKDDEWGMQQFAKDITLKRLSEPEDVAAAVSFLAGPDSNYVTGQTIIVDGGMQFH

SEQ ID NO: 119 - DNA, 777 bp, Leuconostoc mesenteroides
  CDS (1)..(774): Leuconostoc mesenteroides subsp. mesenteroides ATCC 8293; gene LEUM_0117 encoding acetoin reductase
atgtcaaagaaagtagcaattattacaggcagtggtagaggaataggaaaagcaattgctgagagactcgcgacagaaaattattacgttgcagtagtcgacattgatgaatctagtgctaaatatgtgagtgatagtatcaacgctattaaggaaaaccaagccaaatattatgttttagatgttgctgatcgaaaatcagtttttgatttggttgataaagtagtagctgattttgggcgtctagatgtatttgttaataacgcagggattgcctacattgatagcattatcgatagtgatccggaaaaagttgagcggttgtttgatgttaaccttaagggcactttttggggaatccaggcggctgcaaaacagttgaaaaagcaagggagtggcggaaggataatcaatgctgcttcactggctgcagtggaaggatctgcactacaaggcgcatattcagcttccaaatttgccattagaggattaggtcaatctgcggcaaaagaactcgcaaaatataatatcactgtaaatacttatgatccgggtattgttattacacctttgcgcgattatattgatcagcgaacagcacaaattaaaaacacaacagctgagattcaaaggcaaagtgttgtcaatgaaattgcgttaggaagagcggctttgcctgatgatgtagccgatgttgtatcatttttggtttcacagcaggcaaagtatattactgggcaatcgattttaattgatggtggtatgagatttcattga

SEQ ID NO: 120 - protein, 258 aa, Leuconostoc mesenteroides
MSKKVAIITGSGRGIGKAIAERLATENYYVAVVDIDESSAKYVSDSINAIKENQAKYYVLDVADRKSVFDLVDKVVADFGRLDVFVNNAGIAYIDSIIDSDPEKVERLFDVNLKGTFWGIQAAAKQLKKQGSGGRIINAASLAAVEGSALQGAYSASKFAIRGLGQSAAKELAKYNITVNTYDPGIVITPLRDYIDQRTAQIKNTTAEIQRQSVVNEIALGRAALPDDVADVVSFLVSQQAKYITGQSILIDGGMRFH

SEQ ID NO: 121 - DNA, 777 bp, Leuconostoc mesenteroides
  CDS (1)..(774): Leuconostoc mesenteroides subsp. mesenteroides ATCC 8293; gene LEUM_0145 encoding acetoin reductase
atgtcagaaaataaagtcgctttggtaactggagctggtcaaggaattggacaggcaatcgcagaacgattgtcaaaagatgggtttaaggttgccttagttggacgtcatattgaaaaagtacaaaaagtagctgatgaaattaatgaaaatggtggtgaagccattgctattaaggctgatgtggctaaacgtgatgaagtttttgcagccgtcaaagaaacgaaagaaaagttcaatggttttgatgtgattgttaacaatgcgggtgttgcgcctacgacaccaatcatgtcagtaacggaagatgatatgaactggacatggggcattaatgttaatggtattgtctggggaacacaagctgcgacagaagccttcaaggaatttggtcatggtggcaaaatcattaatgcaacatcgcaagctggtgtgcaaggaaatgctaatttgactgcctatggatcaacaaaatttgccattcgcggtattacacaaacaacagctaaagagttagcagaatttggtattacagtaaatgcatttgcgcctggaattgtgaaaacaccgatgatggaagatattgctcatgaagtaagcgtgaacgctggtaaagacgacgaatggggaatggcacaattttcagaaggaatcaccttaggacgactaagtgaaccggaagatatagcaaatgtggtttccttcttgtctagctcagattcaaactatgtgacaggccaaacattaattgttgatggtggtatggtatttagttaa

SEQ ID NO: 122 - protein, 258 aa, Leuconostoc mesenteroides
MSENKVALVTGAGQGIGQAIAERLSKDGFKVALVGRHIEKVQKVADEINENGGEAIAIKADVAKRDEVFAAVKETKEKFNGFDVIVNNAGVAPTTPIMSVTEDDMNWTWGINVNGIVWGTQAATEAFKEFGHGGKIINATSQAGVQGNANLTAYGSTKFAIRGITQTTAKELAEFGITVNAFAPGIVKTPMMEDIAHEVSVNAGKDDEWGMAQFSEGITLGRLSEPEDIANVVSFLSSSDSNYVTGQTLIVDGGMVFS

SEQ ID NO: 123 - DNA, 780 bp, Oenococcus oeni
  CDS (1)..(777): Oenococcus oeni PSU-1; gene OEOE_0693 encoding acetoin reductase
atgtcaaataaagttgcaattattacgggagctggtcaaggaattggtaaagcaattgctcaaagactggcaaaagacggtttcaagacgggactgattggtagacatttagaaaaagtcgaagcagtggcaaaagaactaaatgaagaatatggttccgatactgctatagccaaaaaagccgatgtctcaaaacgcgacgaagtttttgcagcttttcaagaaataagcgacaatttcggagatttgaatgttgtcgtcaataacgctggcgttgctccaaccactccaattatggaagtcaccgaagacgatatggaatggacctggaaaatcaacgttgatggtgttgtatggggaattcaagcggctgcgaccatttttaagaaattcaatcacgctggaaaaatcatcaacgctacctcccaagccggagttcaaggcaatccagatttaaccgcttacggatcgacaaaatttgcgattcgtggaattactcaaacaactgccaaagagttggctaaatttggtattactgttaatgcttacgcacctggaattgtaaaaacaccaatgatggaagacattgcgcacgaagtcggcaagaatgccggaaaagacgacgactggggaatgaatcaatttgccaaaggaatcgccttgggtagaatttccgaaccggaagatgttgccaatgcagttggctttctagcaagttctgattcgaattatgttaccggtcaaacaatcgtcgttgatggaggtatggttttcaactaa

SEQ ID NO: 124 - protein, 259 aa, Oenococcus oeni
MSNKVAIITGAGQGIGKAIAQRLAKDGFKTGLIGRHLEKVEAVAKELNEEYGSDTAIAKKADVSKRDEVFAAFQEISDNFGDLNVVVNNAGVAPTTPIMEVTEDDMEWTWKINVDGVVWGIQAAATIFKKFNHAGKIINATSQAGVQGNPDLTAYGSTKFAIRGITQTTAKELAKFGITVNAYAPGIVKTPMMEDIAHEVGKNAGKDDDWGMNQFAKGIALGRISEPEDVANAVGFLASSDSNYVTGQTIVVDGGMVFN

SEQ ID NO: 125 - DNA, 774 bp, Oenococcus oeni
  CDS (1)..(771): Oenococcus oeni PSU-1; gene OEOE_1602 encoding acetoin reductase
atgacaaataaagtcgcaattgttaccggtggtggtcagggaattggccgtggaatcgctctgcgcctatcaaaagacggatattcagtgattattaatggaagaactcaggagaaactagacaaagttgctgaggagatcaaaaacaacaacggaaaggtgattacttttgttggagatgtctcaagcaagtctgctaacgagcagttagtaaaaaaagccgaatccgaatttggacgtttggacgtttttgtagccaacgctggaatcgattgggttgatactatcgagggaacaccggcagaccaagtagataatgtaataaatattaatttgaaatcgcaaatttgggccttgcaaacggcgccgaaagttatgcgaaaaagtggcgatggaggttcaatcgttttggcttcatcaattgccggcatggaaggtttcgagatgctgggaatctattctgcgactaaatttgcaactcgcggattggttcaagcggcagcaaaagaattggccgtcgacaagattcgcgtcaatgcctataacccaggaattgtcctgacaccaatgtgggatgaaatcgatgcccgttttgccgagcgtaaaaacgttcccgttggatcgacacgccaggcatttatagatggaattctattgggacgtggtgaagaacctgaagatgttgctaaattggtcagcttcttgtccggcgatgaaagtgattatattaccggtcagtcaatcgcggtcgatggtggaattaaattttcttaa

SEQ ID NO: 126 - protein, 257 aa, Oenococcus oeni
MTNKVAIVTGGGQGIGRGIALRLSKDGYSVIINGRTQEKLDKVAEEIKNNNGKVITFVGDVSSKSANEQLVKKAESEFGRLDVFVANAGIDWVDTIEGTPADQVDNVININLKSQIWALQTAPKVMRKSGDGGSIVLASSIAGMEGFEMLGIYSATKFATRGLVQAAAKELAVDKIRVNAYNPGIVLTPMWDEIDARFAERKNVPVGSTRQAFIDGILLGRGEEPEDVAKLVSFLSGDESDYITGQSIAVDGGIKFS

SEQ ID NO: 127 - DNA, 774 bp, Bacillus coagulans
  CDS (1)..(771): Bacillus coagulans 36D1; gene Bcoa_1663 encoding acetoin reductase
atgtctaaagttgcaattgtaacaggatcagctggtgggttaggaaaaggcattgcagaaagattatgctcagatggttttagtgttgttgttcatgatattaacgaacaactattaaatgaaaccgtcaacgaatttaaaaataaaggttatgatgttattggcgtcaaaggtgacgtgtctaaacgaaatgaccaatttaatcttgttaaaaaaggtgttgagaagtttggccatttagatgtatttgtaaataatgctggaattgatgcagtatccccattcttagaaattacagaggaacagctgaataagctctttagtattaatgtaaatggcgttgtttttggaacacaagcagcagccgaacaatttataagccagaaatcaaaagggaaaattatcaacgcatgcagtatagctggacatgaatcctacgaaatgttgggtacatactcagctacgaaacacgcagttaaatcctttactcattccgctgccaaagaattagccaaatatcaaattacagtgaatgcatactgccctggtgtcgctaagacgaaaatgtgggatcgaattgatgaagaaatggtcaaatatagtgatgatttaaaacctggtgaagcatttgaaaagttttcttctgaaatagcattaggaagatatcaaaccccggaagatgtagcaaacttagtttcattcttagcatcagatgacgctgattatataacaggacaagcaattttaacagatggtggacttgtatatagataa

SEQ ID NO: 128 - protein, 257 aa, Bacillus coagulans
MSKVAIVTGSAGGLGKGIAERLCSDGFSVVVHDINEQLLNETVNEFKNKGYDVIGVKGDVSKRNDQFNLVKKGVEKFGHLDVFVNNAGIDAVSPFLEITEEQLNKLFSINVNGVVFGTQAAAEQFISQKSKGKIINACSIAGHESYEMLGTYSATKHAVKSFTHSAAKELAKYQITVNAYCPGVAKTKMWDRIDEEMVKYSDDLKPGEAFEKFSSEIALGRYQTPEDVANLVSFLASDDADYITGQAILTDGGLVYR

SEQ ID NO: 129 - DNA, 981 bp, Lactococcus lactis
  CDS (1)..(978): Lactococcus lactis subsp. cremoris MG1363; gene llmg_1642 encoding 2,3-butanediol dehydrogenase
  misc_feature (1)..(3): Met inserted by tRNA at start codon instead of Val
gtggcttggtgtggaatctgtggtacagatttgcacgaatttttagatggaccaattttttgtccatcagcagaacatccaaatcctattacaggtgaagttccaccagttactctcggacatgaaatgtctggtattgtaaactttgtaggtcaaggggtaagtgggctcaaagtaggtgaccatgtcgttgttgaaccttatatcgttcccgaaggtactgatacaagtgaaactggacattacaatctctcagaaggatcaaactttattggtttgggcggaaatggcggcggtctggctgaaaaaatttcagttgatgaacgttgggtacataaaattcctgacgatttaccattagatgaagcagcactaattgaaccactttctgtgggatatcatgctgttgaacgtgctaatttgagtgaaaagagtacggtactagttgttggagctggtccaatcggacttttgacagctgcagttgccaaagctcaagggcatacagtaattattagtgagcctagtggtttgcgtcgtaaaaaagctcaagaagcagaagttgctgattatttctttaatccaattgaagatgatattcaggcaaaagttcatcaaattaatgaaaaaggagttgatgctgcttttgaatgtacttctgttcaaccaggatttgatgcgtgtttagattctattcgcatgggtggaacagttgttatcgttgcaatttggggtaaaccagctagtgttgacatggcaaaattagtcattaaagaagctaatcttttagggactattgcttataataatactcatcctaaaaccattgatttagttgcaactggtaagattaaattgaatcaatttattacaggtaaaattggcttagatgacctgattgataaaggttttgatactttgattcatcacaatgaaacagcagttaagattttagtttcaccaactggaaaaggtctataa

SEQ ID NO: 130 - protein, 326 aa, Lactococcus lactis
VAWCGICGTDLHEFLDGPIFCPSAEHPNPITGEVPPVTLGHEMSGIVNFVGQGVSGLKVGDHVVVEPYIVPEGTDTSETGHYNLSEGSNFIGLGGNGGGLAEKISVDERWVHKIPDDLPLDEAALIEPLSVGYHAVERANLSEKSTVLVVGAGPIGLLTAAVAKAQGHTVIISEPSGLRRKKAQEAEVADYFFNPIEDDIQAKVHQINEKGVDAAFECTSVQPGFDACLDSIRMGGTVVIVAIWGKPASVDMAKLVIKEANLLGTIAYNNTHPKTIDLVATGKIKLNQFITGKIGLDDLIDKGFDTLIHHNETAVKILVSPTGKGL

SEQ ID NO: 131 - DNA, 1341 bp, Lactococcus lactis
  CDS (1)..(1338): Lactococcus lactis subsp. cremoris MG1363; gene llmg_0408 encoding H2O forming NADH oxidase
atgaaaatcgtagttatcggtacaaaccacgcaggcattgctacagcgaatacattacttgaacaatatcccgggcatgaaattgtcatgattgaccgtaatagcaacatgagttatctaggttgtggcacagcaatttgggttggaagacaaattgaaaaaccagatgaattattttatgccaaagcagaggattttgaggcaaaaggggtaaaaattttgactgaaacagaagtttcagaaattgattttgctaataagaaagtttatgcaaaaactaaatctgatgatgaaataattgaagcttacgacaagcttgttttagcaacaggttcacgtccaattattcctaatctaccaggcaaagaccttaagggaattcattttctgaaactttttcaagaaggtcaagcaattgacgcagaatttgccaaagaaaaagtcaagcgtatcgcagtcattggtgcaggatatatcggtacagagattgcggaagcagctaaacgtcggggtaaagaagttcttctctttgacgctgaaaatacttcacttgcatcatattatgatgaagaatttgccaaaggaatggatgaaaaccttgctcaacatggaattgaacttcattttggagaactggccaaagaatttaaagcgaatgaggaaggttatgtatcacaaatcgtaaccaacaaggcgacttatgatgttgatcttgtcatcaattgtattggttttactgccaacagtgccttggcaagtgataagttagctaccttcaaaaatggcgcaatcaaggtggataagcatcaacaaagtagtgatccagatgtttacgcggtaggtgatgttgcgacaatttattctaatgccttgcaagattttacttatatcgctcttgcctcaaacgctgttcggtcaggaattgtcgcaggacacaatattggtggaaaagaattagaatctgttggtgttcaaggttctaatggtatttcgatttttggttacaatatgacttctacaggactttctgttaaagctgctaaaaaattaggtttagaagtttcatttagtgattttgaagataaacaaaaagcttggtttcttcatgaaaacaacgatagtgtgaaaattcgtatcgtatatgagacaaaaagtcgcagaattattggagcacaacttgctagtaaaagtgagataattgcaggaaatataaatatgttcagtttagcgattcaagagaaaaaaacaattgatgaactagctttgcttgatttattctttctcccccacttcaacagtccatataattatatgacagttgcagctttgaatgccaaataa

SEQ ID NO: 132 - protein, 446 aa, Lactococcus lactis
MKIVVIGTNHAGIATANTLLEQYPGHEIVMIDRNSNMSYLGCGTAIWVGRQIEKPDELFYAKAEDFEAKGVKILTETEVSEIDFANKKVYAKTKSDDEIIEAYDKLVLATGSRPIIPNLPGKDLKGIHFLKLFQEGQAIDAEFAKEKVKRIAVIGAGYIGTEIAEAAKRRGKEVLLFDAENTSLASYYDEEFAKGMDENLAQHGIELHFGELAKEFKANEEGYVSQIVTNKATYDVDLVINCIGFTANSALASDKLATFKNGAIKVDKHQQSSDPDVYAVGDVATIYSNALQDFTYIALASNAVRSGIVAGHNIGGKELESVGVQGSNGISIFGYNMTSTGLSVKAAKKLGLEVSFSDFEDKQKAWFLHENNDSVKIRIVYETKSRRIIGAQLASKSEIIAGNINMFSLAIQEKKTIDELALLDLFFLPHFNSPYNYMTVAALNAK

SEQ ID NO: 133 - DNA, 981 bp, Lactobacillus casei; identical to SEQ ID NO: 29
  CDS (1)..(978): Lactobacillus casei ATCC 334; gene LSEI_2549 encoding H2O-forming NADH oxidase
  misc_feature (1)..(3): Met inserted by tRNA at start codon instead of Val

SEQ ID NO: 134 - protein, 326 aa, Lactobacillus casei; identical to SEQ ID NO: 30

SEQ ID NO: 135 - DNA, 1413 bp, Lactobacillus plantarum
  CDS (1)..(1410): Lactobacillus plantarum WCFS1; gene lp_0760 encoding H2O-forming NADH oxidase
atgaagattgtaattgttggatgtacgcatgcggggaccgctgcggctgcacaaattctgaaggatcatccggaggctacggtcacgatttatgagcgtgatgacaatatttcattcttatcatgtgggatctacctttatctcgggggaaaggtcaatcacttggaagatatgttctattcgtcaccagaaacgttagccaagttgggggcaatggtcagaaccaaacataacgtgttaaaaattgacgcccagtcgaagaccttacaagtggttgacatgactactggaaaagtgtttggcgatacttatgataaattgattatgacgactggttcaaatgttgcggtcccgccgatttttggaatcgatgagtctaaggtcctattatgcaagacctacagccaagcacaggaaatttaccaaacagcccaagacaatcagcggatcgcaatcattggggcgggttatattggaaccgaattatctgaaagttatgcaaatacacatcatgaagtaacgttattccaatcgcatgatcaaattttgaataattacattagtaaagaaatttcagaccaagcagttcagctattaaaagatcatggcgtgaacgtgctattgaatcaccaagtaactgcctttactggtaatgatgatggtgaacttgtcattgaaaccaatcaaggcgattttaatgctgatctagcaattgtcggaactgggtttgttcccaatacagaactgttacgcggtcaagttgagatggataagcacggtgccattatcatcaatgattacgttcagacctctgacccagatatttacgctgctggtgattcttgtgtcgttaacttcaacccaactgggcgttcggcttatacgccattagcaaccaatgcggttcggcagggtgcgttagcgggggccaatgtttttggtaaccagcaacgatatatggggactcaagcgacatcggccatgcaactcttcgatcacacgctggcaaccacggggttaacactggcaatggcgaaattgaatcatattccagctgaacgggtgacttatgagggcaactggcgaccagcttacatgccaagtacggcgaaactgacgattgaattaatttataatccggaaaatcgtaaaattctcggtgctcagttcttaagtgcgcatgaagtggcacagtctgctaatgcgttatcaatcgcgattcaaaatggaaacaccatcgatgatctagcatttgtggatatgttattctcacctaattttgatgaaccattcaattatctgaacctcgtcgcccaacaagcgattgaacaagaacgccaggcaggccgcaatcacccacgaattacggcctatggcgattgggccaagcaaaatgacaaggatttacaataa

SEQ ID NO: 136 - protein, 470 aa, Lactobacillus plantarum
MKIVIVGCTHAGTAAAAQILKDHPEATVTIYERDDNISFLSCGIYLYLGGKVNHLEDMFYSSPETLAKLGAMVRTKHNVLKIDAQSKTLQVVDMTTGKVFGDTYDKLIMTTGSNVAVPPIFGIDESKVLLCKTYSQAQEIYQTAQDNQRIAIIGAGYIGTELSESYANTHHEVTLFQSHDQILNNYISKEISDQAVQLLKDHGVNVLLNHQVTAFTGNDDGELVIETNQGDFNADLAIVGTGFVPNTELLRGQVEMDKHGAIIINDYVQTSDPDIYAAGDSCVVNFNPTGRSAYTPLATNAVRQGALAGANVFGNQQRYMGTQATSAMQLFDHTLATTGLTLAMAKLNHIPAERVTYEGNWRPAYMPSTAKLTIELIYNPENRKILGAQFLSAHEVAQSANALSIAIQNGNTIDDLAFVDMLFSPNFDEPFNYLNLVAQQAIEQERQAGRNHPRITAYGDWAKQNDKDLQ

SEQ ID NO: 137 - DNA, 1359 bp, Lactobacillus plantarum
  CDS (1)..(1356): Lactobacillus plantarum WCFS1; gene lp_0766 encoding H2O-forming NADH oxidase
atgaaagttgccattattggctgtacacatgcggggattgccgccatgaaacaaatcttgaaatattatccgggcactgaaattaccgtctatgaacggcacgcggatatttcatatatgtcttgtgggacttatctacacttagggggtaccatccataatttggatcaagcgttgtacgctaatcctagtgaatttagtgaacaaggtgtgcagatgcggatgcagtatgatgtgatcaatgtgaatgctgataagcatacaattttggctcaaaatttacagacaaaagaattacaaacggatcactatgataagttagtcatggcgacgggttcaatcactgcaatcccggctattccgggcgtagagaatcctaaggtcatgctttgcaaaacatgtgaacaggcccagcaactctacgaagcagctaaacatgcacaccatattgcaatcgttggtggtggctattcgggggtggaacttgctgaggggtacgtgaagtctggacacactgtgacgttgtttcaacggggcccccacttaattaatgagtatcttgatccacaaatttctgagaagatcgaagacttgttaacgacgaaaggcatccaagttagaaccaatgcacaagtgacggcttttagtgatacggctgataatcgactacgagttgcaaccgctgatagtgaagaaatatttgatatggctgttatttgtccgggggtgattccacaatcagagttattggcgggacaggtcaaccgaacgaagcagggggccattgtaacggaccgttatatgggaacctccaacccggatatatttgcggctggcgatgtgacggaagttaactttaatcctacgaaggaacacgcctatatgccattagtctcacatgcaattcggcaaggtgcactggcaggaattaatatctttgataaacgcttaggtgcaattggtacgcaagcgacgactgggatgttgatttttgatcagaccgtggcttgtgcaggtctgaccttaacggcggccaaagcagctaacttcgatgcccaagcagctttttatgaaggcaattatcggccggactttatgcctaccacggcgaaagtcatgattgagttggtttatgatcaacaaacgcggaaggttttgggtggtcaactaatgagtgctcatgaagtttcacaatcagcaaatacgttgtccgtagtgattcataatggtaatacgattgatgaattagccttcatggatatgctattctcacccaactttgatgaaccgtttaattacttgaatttagtggcgcaggctgcagtagatcaggaacatggctatcgtcggaataattaa

SEQ ID NO: 138 - protein, 452 aa, Lactobacillus plantarum
MKVAIIGCTHAGIAAMKQILKYYPGTEITVYERHADISYMSCGTYLHLGGTIHNLDQALYANPSEFSEQGVQMRMQYDVINVNADKHTILAQNLQTKELQTDHYDKLVMATGSITAIPAIPGVENPKVMLCKTCEQAQQLYEAAKHAHHIAIVGGGYSGVELAEGYVKSGHTVTLFQRGPHLINEYLDPQISEKIEDLLTTKGIQVRTNAQVTAFSDTADNRLRVATADSEEIFDMAVICPGVIPQSELLAGQVNRTKQGAIVTDRYMGTSNPDIFAAGDVTEVNFNPTKEHAYMPLVSHAIRQGALAGINIFDKRLGAIGTQATTGMLIFDQTVACAGLTLTAAKAANFDAQAAFYEGNYRPDFMPTTAKVMIELVYDQQTRKVLGGQLMSAHEVSQSANTLSVVIHNGNTIDELAFMDMLFSPNFDEPFNYLNLVAQAAVDQEHGYRRNN

SEQ ID NO: 139 - DNA, 1692 bp, Lactobacillus plantarum
  CDS (1)..(1689): Lactobacillus plantarum WCFS1; gene lp_1925 encoding H2O-forming NADH oxidase
atggaagtgaaaaaagtggtcattgttggtggcgttggtggtggtgcttcggcggcggcccgcgtgcgtcgattggacgagttcgcccagattacaatttttgaaaaggggccggatgtctcattttccaattgtgccttaccgtacacattcagtgatgtgattgaccagcccgatgacgtgattttaaagacaccgatgcaattcgagcaacagtacaatattgacgttcaagtgaatacaacggttgtcgccattgatgcgcaggctaagacagtgatgatcaaacggcaaggacaggtagcaacgacgatcgtcccatatgatacactgattctttcacctggtgctcgaccaatactacccgcagtgattgcgggaatcgaccggcccaatgttaaaacggtccgcaatgttcaagatgtccgaacgattcaagcgtatctgactgaacaacacgttcatgatgtgacgattgttggcggtggctttatcggactagagatggctgaaaatttacaacaggctggctatcagatcacaatcattgaggctgccgagcacgtcttgggcactttggatgacgagtttgctcagctagtacacaaggaactatacgatcacggtgtgcaggtgatactgcaagaacaagtgacggccattggtgcaacacaagtgcagctcgcctcgggacgcgccgtgaccagccagttagtgattgtggcaattggggttacaccagtaactgaattagcggttcaagcgggttgtgcgttaggcgtgaccggtggtatcaaggttgatcatcgttaccagacgtccgtggccgacatttatgcggtgggtgatgccattgaagtgactaatcggcttacacgtcaatctacgcggctagcattggcatttcccgcacaaatgcaggcccgacacatggtggatcatttatacgggcggacgccacagtatcagggtgtgatcggatcgcaggttcttcacgtctttacgttaaacgtggcgtcaacgggcctgaacgctactgagtgtgagcaccagcaacttgattatcggttcgcaacggtggcaccacagaatcgggtcagcgtgatgccagggacaacagccgtctttcttaagttgatattcagttatccgaccggtgagattttgggcgcgcaggccattggtcaatcggacgttgacaaaccgattgatattatcgctagtctaatcacgatgcacggtcgagtcagtgacctgacagatgttgaattatgttattcgccatgggtcagtaccgccaaaaatgtcgtcaacatggttggcttggtggcggaaaacgtcctgaatgatgaatttaagcaggttgcggtgacacaggttcgacagctggtcttggcgggggcgtttatcatcgatgcccgtgaaccacaagagtacgctgatgggcacatcaagggcgcgcataatattccactgagtcagtttcgacagcgcttagtggaaattccaaccaatcagccagtttatattcattgtcagaccggacagcgaagttacaatatggtccgcgcgttacttcagcgcggctatacgaatgtggtcaacattgctgggtcgtatgccgaactagttcagtatgaatattttaatgatcagacaacagggcgaacctcaattctgacacgaacatga

SEQ ID NO: 140 - protein, 563 aa, Lactobacillus plantarum
MEVKKVVIVGGVGGGASAAARVRRLDEFAQITIFEKGPDVSFSNCALPYTFSDVIDQPDDVILKTPMQFEQQYNIDVQVNTTVVAIDAQAKTVMIKRQGQVATTIVPYDTLILSPGARPILPAVIAGIDRPNVKTVRNVQDVRTIQAYLTEQHVHDVTIVGGGFIGLEMAENLQQAGYQITIIEAAEHVLGTLDDEFAQLVHKELYDHGVQVILQEQVTAIGATQVQLASGRAVTSQLVIVAIGVTPVTELAVQAGCALGVTGGIKVDHRYQTSVADIYAVGDAIEVTNRLTRQSTRLALAFPAQMQARHMVDHLYGRTPQYQGVIGSQVLHVFTLNVASTGLNATECEHQQLDYRFATVAPQNRVSVMPGTTAVFLKLIFSYPTGEILGAQAIGQSDVDKPIDIIASLITMHGRVSDLTDVELCYSPWVSTAKNVVNMVGLVAENVLNDEFKQVAVTQVRQLVLAGAFIIDAREPQEYADGHIKGAHNIPLSQFRQRLVEIPTNQPVYIHCQTGQRSYNMVRALLQRGYTNVVNIAGSYAELVQYEYFNDQTTGRTSILTRT

SEQ ID NO: 141 - DNA, 1407 bp, Lactobacillus plantarum
  CDS (1)..(1404): Lactobacillus plantarum WCFS1; gene lp_1941 encoding H2O-forming NADH oxidase
atgaaagtaatgatcatcggtagtacccacgctggtacggcagcggcacgcgaaattttaacacgtcatccggagacggcggtgacgatttacgagcggaatgataacgtttcgtttgtttcgagtgggatttatttgtacttaacgggtgtcatccaacacctggaagacatgttttacacctcgccgtctgacttgaagcagttaggcgctcaagttaagacccgccataatgttttacgaattgatacgggccataaaacggtgcaggtcgccaatatgcagactggcgaagtctttgatgacacttatgataagctgattatggcaactggttcatcagttattgtgccaccaattatgggtatcgatcatgagaaagtattactgtgcaaaaactacgagcaggcggaacaactttatcaatctctacaggccaaccaacgcgttgcaattgttggggccggatatatggggaccgagttagcggaaagctatgctagtatggaccaacaagtcatgttatttcattcgcattcacatattttgaataattatcttggcccccaaatggcggatgctgcaactaaactcttacaacatcaccaggtcgatatccacctcaatgaacgggtgactggattcgcaagcggttcgaatgatcagttgatcgttgaaaccgcgcagggtgattatgaggttgatctggccgtcgtttgcgcgggctttatgccgaatacggaattgttacgcgggcaggtcgctatggaccgccatggtgctatcttgatcaatgattatgttcaaacctctgacccggatatttatgcggctggggatgcttgcgtggtcaattataatcccacgggacagccggcgtatacaccattggcaactaacgcactgcgccaaggtgcgttggcggggatcaatgttttcggagatttacagccgtacatgggaacgcaagccacctcagccatgcaattatttgatcacacgatggccacaactgggttgacctatctagccgcgcaaagacgagaactaccagtacgacacgccgtctatcaaggcaattggcggccagcttatatgccgacgacggccaaagtcacgattgaactagtttataattatcagaatcgtcagcttctcggcgcgcaattctggagtcgtcacgacattgcccaagctgcaaacacgatctcagtaatgattcaaaatcagaatacgattgatgatttggcttacgtggatatgttctttcagccgaattttaatcaaccgttcaactatttaaatttggtggggcaactagccgtcaaacaagaatatcagcgaggcaatcaaacaccacgaattacagctcgtggtaactggtcgactagtagtgataagcattga

SEQ ID NO: 142 - protein, 468 aa, Lactobacillus plantarum
MKVMIIGSTHAGTAAAREILTRHPETAVTIYERNDNVSFVSSGIYLYLTGVIQHLEDMFYTSPSDLKQLGAQVKTRHNVLRIDTGHKTVQVANMQTGEVFDDTYDKLIMATGSSVIVPPIMGIDHEKVLLCKNYEQAEQLYQSLQANQRVAIVGAGYMGTELAESYASMDQQVMLFHSHSHILNNYLGPQMADAATKLLQHHQVDIHLNERVTGFASGSNDQLIVETAQGDYEVDLAVVCAGFMPNTELLRGQVAMDRHGAILINDYVQTSDPDIYAAGDACVVNYNPTGQPAYTPLATNALRQGALAGINVFGDLQPYMGTQATSAMQLFDHTMATTGLTYLAAQRRELPVRHAVYQGNWRPAYMPTTAKVTIELVYNYQNRQLLGAQFWSRHDIAQAANTISVMIQNQNTIDDLAYVDMFFQPNFNQPFNYLNLVGQLAVKQEYQRGNQTPRITARGNWSTSSDKH

SEQ ID NO: 143 - DNA, 1353 bp, Lactobacillus plantarum
  CDS (1)..(1350): Lactobacillus plantarum WCFS1; gene lp_3449 encoding H2O-forming NADH oxidase
atgaaagttattgtaattggttgtacccatgccggcactgctgccgttaatcagattttagcatcaaatccagatactgaagtgacgatttatgaaagaaatgacaatgtctcgttcctatcctgtgggatcgcactttaccttggcggccaagttgctgatcctcaaggcctattttattccagtcctgaacagttagctaagttaggcgcaactgttcatatgcaacatgatgtgacggatgtgaatactgacaaacatgaaattacggttactgatttaaagactggtgaatctaagactgatcactatgacaagttagttgtcactactggttcatggcctgttattccaccaattgacggcatcgatagtcccaatgtctacttatgcaagaactggacgcacgctcagaatttatgggaagcagccaaaccagctaagcgggtcattgtgatcggtggcggttatatcggtactgaattagttgaagcttaccagaagcaaggtaaggaagtcacactaattgatggtttaccacggattttaaataaatacttagacaaagaattcactgaccgggttgaacaagactttgttgatcacggtatcaagatggctttgaatcaaatggtgcaaggcttcagtgatgatggtaaagaagttacggtcaagactgacaagggcagctacacagccgacatggcgattctttgtgttggcttccggccaaataccggcttactcaagggcaaggtcgatatgaacgctaatggctcgatcaagaccaatgactacatgcaaacttctgatccagacatttacggggctggtgactcggttgctgttcactataacccaactaagaaagatgcttatatcccattagcaacgaatgcggttcgccaaggaaccttagttggtttgaacatcttcaagccaacgcggaagtacatggggacacaatcaacttctgggttaatgttgttcggccaaaccatcgtttcatctgggatgaccctagaacatgcacaggccgaaaatgttccggcagccgctgtcacttttgaagacaactaccggccagaatttatgccaaccactaagcctgttttaatgcaattggtttacaatcctgaaactcgcgaaatcctaggtgcacaattcatgagtgaacatgatgtttcgcaatcagccaatgtgatttcagtgatgattcaaaatcacaataccattgacgacttagggttcgtagatatgttcttccaaccaatttacgaccggccatttaactatttgaacttacttggtcaagcagcgattgcccatgcggccgaagctgtcactgaataa

SEQ ID NO: 144 - protein, 450 aa, Lactobacillus plantarum
MKVIVIGCTHAGTAAVNQILASNPDTEVTIYERNDNVSFLSCGIALYLGGQVADPQGLFYSSPEQLAKLGATVHMQHDVTDVNTDKHEITVTDLKTGESKTDHYDKLVVTTGSWPVIPPIDGIDSPNVYLCKNWTHAQNLWEAAKPAKRVIVIGGGYIGTELVEAYQKQGKEVTLIDGLPRILNKYLDKEFTDRVEQDFVDHGIKMALNQMVQGFSDDGKEVTVKTDKGSYTADMAILCVGFRPNTGLLKGKVDMNANGSIKTNDYMQTSDPDIYGAGDSVAVHYNPTKKDAYIPLATNAVRQGTLVGLNIFKPTRKYMGTQSTSGLMLFGQTIVSSGMTLEHAQAENVPAAAVTFEDNYRPEFMPTTKPVLMQLVYNPETREILGAQFMSEHDVSQSANVISVMIQNHNTIDDLGFVDMFFQPIYDRPFNYLNLLGQAAIAHAAEAVTE

SEQ ID NO: 145 - DNA, 1386 bp, Streptococcus thermophilus
  CDS (1)..(1383): Streptococcus thermophilus CNRZ1066; gene str1281 encoding H20-forming NADH oxidase
  misc_feature (1)..(3): Met inserted by tRNA at start codon (TTG) instead of Leu
ttggataaatttatgtcaaaaatcgtagttgtcggtgctaaccatgctggtacttatagtattaatactattcttgataattacggagaccaaaatgaagtagttgttttcgatcaaaactctaacatttcattcttgggttgtggtatggctctttggattggtaatcaaatctcaggtcctgatggccttttctatgccaacaaagaaggccttgaaagcaagggtgcaaaagtttatataaactcaccagttgagtctattgactttgacggtaaaactgttacagctcttgttgatggtaaagaacatgttgaatcatatgacaaattgattttagctactggttcacaaccaatcttacctccaatcgatggtgctgagattaaagaaggtagccgtactttcgaagcgactcttgaaaaccttcaattcgttaaacttttccaaaacgctcaagaagttattgataagttgaacgataaatcacaagacatcaaacgtgtagcagtcgttggtgcaggttacattggtgttgaattggctgaagccttccaacgtcatggtaaagaagttatccttattgatgttgttgacacatgtttggcaggatactatgaccgcgattttacagaccgtatggctaaaaatttggaagaccacggtatccaattggcctttggcgaaactgttaaagcagtagaaggtgaaactaaggtagaacgcatcgtaacagataaaaatgcgtacgatgtagatatggttgttcttgctgttggtttccgtcctaatacagcccttggagctggtaaattggaaacattccgaaatggtgcttaccttgttaataagaaacaagaaacatcagttaaggatgtttacgctgttggtgattgtgctacggtttatgacaatgctcttgacgatgtcaactacattgccttagcttcaaatgctattcgttcaggtattgtcgctggacacaatgccggtggtggtgatgttgaatcaaacggtgttcaaggatcaaatggtatctctatctatggtttgaacatggtttctactggtttgactgaagagaaggcaaaacgctttggtttcaatccagcagtagtagaatcaacggatcttcaaaaacctcccttcatgaaggatgaaaatgaagatgtaactatcaagattgtttatgataaagatactcgtaaagttttgggtgctcaaatggtttcactcatggatatctcaatgggaatccacatgttctcattggcaattcaagaaggagtaacaattgaccgtctacaattgcttgatttgttcttcttgccacactttaaccaaccacttagctatattgctaaagcagctatctccgctgaataa

SEQ ID NO: 146 - protein, 461 aa, Streptococcus thermophilus
LDKFMSKIVVVGANHAGTYSINTILDNYGDQNEVVVFDQNSNISFLGCGMALWIGNQISGPDGLFYANKEGLESKGAKVYINSPVESIDFDGKTVTALVDGKEHVESYDKLILATGSQPILPPIDGAEIKEGSRTFEATLENLQFVKLFQNAQEVIDKLNDKSQDIKRVAVVGAGYIGVELAEAFQRHGKEVILIDVVDTCLAGYYDRDFTDRMAKNLEDHGIQLAFGETVKAVEGETKVERIVTDKNAYDVDMVVLAVGFRPNTALGAGKLETFRNGAYLVNKKQETSVKDVYAVGDCATVYDNALDDVNYIALASNAIRSGIVAGHNAGGGDVESNGVQGSNGISIYGLNMVSTGLTEEKAKRFGFNPAVVESTDLQKPPFMKDENEDVTIKIVYDKDTRKVLGAQMVSLMDISMGIHMFSLAIQEGVTIDRLQLLDLFFLPHFNQPLSYIAKAAISAE

SEQ ID NO: 147 - DNA, 1992 bp, Bacillus coagulans
  CDS (1)..(1989): Bacillus coagulans 36D1; gene Bcoa_0725 encoding H2O-forming NADH oxidase
atgaaatacaaaaagctatttgaaactgtgaaaataaggaatgtggaactcaaaaatcgttatgcaatggcaccaatgggtccgctgggtcttgccgatgcagaaggcggtttcaaccagcgcgggattgagtattatacagcccgtgcgcgcgggggaaccgctctgattattaccggcgtcactttcgttgataatgaagtggaagagcacggaatgccaaacgtaccttgcccgacccataaccctgtccattttgtccggacttccaaagaaatgacagagcgcatccatgcatatgattcgaaaatttttctgcaaatgagcgccggttttggccgggtgacgatcccgacaaaccttggcgagtacccgccggttgcaccgtcgccaatcccgcatcgctggctggataaaacatgtcgcgaactgacagttgaagaaattcattccattgtccgcaaattcggggatggggcgttcaatgcgaagcgcgccggatttgacggggtgcaaatccatgctgtgcacgaaggctatttgctcgaccagtttgcgattgcgtttttcaacaaacgtaccgatgcatacggtggcccgcttgaaaatcgccttcgttttgcccgggaaattgtcgaggaaattaaacagcgctgtggcgaagattttcctgtgacgctccgcttcagcccgaaaagttttatcaaggattggcgggaaggggcactgcctggcgaggagtttgaagaaaaaggccgcgatttggatgaaggcatcgaggcagcaaagctgctcgtttcctacggctatgatgctctggacgtcgatgttggttcttatgattcatggtggtggagccatcctccgatgtaccagaagaaggggctttacattccgtatgccaggctggtgaaggaagctgtcgatgtgcctgtcctttgcgcgggccgcatggacaatccggatcttgcacttgccgcactggaagacggagcatgtgatattatcagcttgggccgcccgttattggctgacccggattacgtcaataagctccgaatcgggcaggttgccgatatccgcccgtgtctgtcatgccatgaaggctgcatgggtcggatccaggagtattcttccttaggctgcgcagtgaatccggctgcctgtcgagaaaaagaagcagcattgacacctgctttaaaaaagaaacgcgtactgattgcaggcggcggcgtggccggatgcgaagctgcccgtgtgcttgcattgcgcggccatgaaccggtcatttttgaaaaatcgaaccgtttaggcggcaacttgatccctggcggcgcacctgattttaaagaagatgacctggcgcttgttgcctggtatgagcatacgttggaacgccttggcgtagaaattcatttgaatactgcattgacaaaagaagaaattttggctgcaaacgtggatgccgtgctgattgcaacgggttcgaatccgaaaattttgccgctcgacggaaaaaacaaagtatttacagcagaagatgttttgctcgataaagtggatgccgggcaacatgttgtcattgtcggcggcggtcttgtcggctgcgaactggctttgaaccttgcagaaaaaggaaaagatgtctcgcttgtggaaatgcaggacaaactgctggcagttaatggtccgctttgccacgctaactcggacatgctggaaagactcgtaccgtttaaaggtgttcaagtctacacttcttcaaaaatagtagatacgacagaaaagacagccgttgtggatgttgacggcgaattgcgtgaaattgaagcagacagcattgtgctcgcagtcggctactcggctgaaaaatcactctatgaagatttaaagtttgaggttgccgatcttcatgtggttggcgatgcccgcaaggtcgcaaacatcatgtatgccatctgggatgcttacgaagtcgcggcaaatctgtaa

SEQ ID NO: 148 - protein, 663 aa, Bacillus coagulans
MKYKKLFETVKIRNVELKNRYAMAPMGPLGLADAEGGFNQRGIEYYTARARGGTALIITGVTFVDNEVEEHGMPNVPCPTHNPVHFVRTSKEMTERIHAYDSKIFLQMSAGFGRVTIPTNLGEYPPVAPSPIPHRWLDKTCRELTVEEIHSIVRKFGDGAFNAKRAGFDGVQIHAVHEGYLLDQFAIAFFNKRTDAYGGPLENRLRFAREIVEEIKQRCGEDFPVTLRFSPKSFIKDWREGALPGEEFEEKGRDLDEGIEAAKLLVSYGYDALDVDVGSYDSWWWSHPPMYQKKGLYIPYARLVKEAVDVPVLCAGRMDNPDLALAALEDGACDIISLGRPLLADPDYVNKLRIGQVADIRPCLSCHEGCMGRIQEYSSLGCAVNPAACREKEAALTPALKKKRVLIAGGGVAGCEAARVLALRGHEPVIFEKSNRLGGNLIPGGAPDFKEDDLALVAWYEHTLERLGVEIHLNTALTKEEILAANVDAVLIATGSNPKILPLDGKNKVFTAEDVLLDKVDAGQHVVIVGGGLVGCELALNLAEKGKDVSLVEMQDKLLAVNGPLCHANSDMLERLVPFKGVQVYTSSKIVDTTEKTAVVDVDGELREIEADSIVLAVGYSAEKSLYEDLKFEVADLHVVGDARKVANIMYAIWDAYEVAANL

SEQ ID NO: 149 - DNA, 1119 bp, Bacillus coagulans
  CDS (1)..(1116): Bacillus coagulans 36D1; gene Bcoa_0915 encoding H2O-forming NADH oxidase
atgagcaaatacgataaactgtttgaaccaattacgtttaaaagcggcgtcagggcggaaaaccgcatcgtgatggcgccgatgacccattattcctcgaatgatgacggcacgatttccgctgccgagctgcgttattatgcagaacgtgccaaagggccggggatggtcgtgacggcatgtgccaatgttacggaaaacggcaaagcatttaccgggcaacctggcgcgcatacagatgaaatggttgagagcatgaaaaaactagcacaaacgattcagcaaaacggtgcaaaagcggttgtgcaaatccaccatggtggccgcgaatgcccggctgaactcgtgccgggcggggatgttgtgagcgcaagtgaaacagattcgtcagacggcagcgtccatgcacgcgcgttgacgggagaagaaaccgctgaaattgtgaaagcattcggcgaagcaacacgccgcgtgatcgaagctggttttgatggcgttgaaattcacggcgcaaacggctatctgattcaacaatttttctccccgtatacgaaccggcgtgaagacgagtggggcggcagtctggaaaaacggcttgcattcccgcttgctgtcgtcgatgctgtgaaaaaaacggtggcggaatatgcggaccggccgtttttagtcggataccgcttatccccggaagaaccgtacgaaccggggattacgatggatgacacgttcgcgcttttggatgcgctgatgaaaaaagagctcgactatgtgcatatttccctgcagcacttctggtctaaagcccgccgcggcggtgaacccggccgtccgcgcatggaacagatcgtggaacatgtcgcaggccgcgtgcctttgatcggcgtcggctccctgcacacaggagacgaggttttgaaggcaatggaaaccgatgtaccgcttattgccctcggccgtgagcttgtcatggagccgcattgggtggaaaaaattaaagccggccaggaggatgcaattcaaaccgcgttaagaaaagacgaccgcgaacggctcgttattccggaaccgctgtggaagatgatcatctcaacgccgggctggttcccgtttgcagaatga

SEQ ID NO: 150 - protein, 372 aa, Bacillus coagulans
MSKYDKLFEPITFKSGVRAENRIVMAPMTHYSSNDDGTISAAELRYYAERAKGPGMVVTACANVTENGKAFTGQPGAHTDEMVESMKKLAQTIQQNGAKAVVQIHHGGRECPAELVPGGDVVSASETDSSDGSVHARALTGEETAEIVKAFGEATRRVIEAGFDGVEIHGANGYLIQQFFSPYTNRREDEWGGSLEKRLAFPLAVVDAVKKTVAEYADRPFLVGYRLSPEEPYEPGITMDDTFALLDALMKKELDYVHISLQHFWSKARRGGEPGRPRMEQIVEHVAGRVPLIGVGSLHTGDEVLKAMETDVPLIALGRELVMEPHWVEKIKAGQEDAIQTALRKDDRERLVIPEPLWKMIISTPGWFPFAE

SEQ ID NO: 151 - DNA, 1032 bp, Bacillus coagulans
  CDS (1)..(1029): Bacillus coagulans 36D1; gene Bcoa_2324 encoding H2O-forming NADH oxidase
atgaatgatttatttaccccgtacaagctgaaatcgcttgaagtgaaaaaccgtattgtcatgcctcccatgtgccaatattccgttgagaaaaaagacggcgttgccactgactggcattatgtccattacgtcagccgtgccatcgggggcaccggcctgatcattatggagatgaccgatgtggagccggacggcagaattaccgacaacgatctcggcttatggtctgatgagcagatcgcgccgcttgccaaaattgtggaagcgtgccaccagtacggcgccaaagtcgggattcaaatcggacatgccggcagaaaagcacaggatgcaaaacaaccagttgccccttcccccatcccttttgatgaccatgcaaaaacaccgagggcattaacgaaggaagaaatcaaagaaatcgtccgcaaatttggcgaatctgtccgccgcgctgtccaggccggttttgacacgatcgaactgcacggcgcacacggttatctgatccatgaattccagtcgcgctatacaaacaaacggtcagatgaatacggacaggatttggcattatttggaaaagaagtcattgccgctgccaaaagcgaaatgcctgccgacatgccacttattatgcgcatttcagcccgtgaatatgtcgatggcgggtatggcattgaagaaagtattgcgctttcgaaggcgtataaagaagccggtgttgacctgtttcatattagttccggaggcgagggccatatcggtgcggccggccgcccggggacgcacgccgcttatcaggtgccgcttgcacgccagatcaaagaggctttaaacgttccggtcattgcagtcggccggctggaagacccggttcttgccaatgcggtaatcggaaacgaagaagcagatcttgttgcggtcggcagaggcatgctccgcaacccttattgggcgctcaatgcagggatcgcgctcggcaaagacgcaggtgtgccgatccaatatacaagggggtttccaaaaaggtaa

SEQ ID NO: 152 - protein, 343 aa, Bacillus coagulans
MNDLFTPYKLKSLEVKNRIVMPPMCQYSVEKKDGVATDWHYVHYVSRAIGGTGLIIMEMTDVEPDGRITDNDLGLWSDEQIAPLAKIVEACHQYGAKVGIQIGHAGRKAQDAKQPVAPSPIPFDDHAKTPRALTKEEIKEIVRKFGESVRRAVQAGFDTIELHGAHGYLIHEFQSRYTNKRSDEYGQDLALFGKEVIAAAKSEMPADMPLIMRISAREYVDGGYGIEESIALSKAYKEAGVDLFHISSGGEGHIGAAGRPGTHAAYQVPLARQIKEALNVPVIAVGRLEDPVLANAVIGNEEADLVAVGRGMLRNPYWALNAGIALGKDAGVPIQYTRGFPKR

SEQ ID NO: 153 - DNA, 20 bp, Lactococcus lactis
  primer_bind (1)..(20): 43 (T3) primer
aattaaccctcactaaaggg

SEQ ID NO: 154 - DNA, 22 bp, Lactococcus lactis
  primer_bind (1)..(22): Primer 603
atcaacctttgatacaaggttg

SEQ ID NO: 155 - DNA, 108 bp, Lactococcus lactis
  primer_bind (1)..(108): Primer 710
  modified_base (11)..(15): a, c, g, or t
  modified_base (31)..(44): a, c, g, or t
  modified_base (54)..(57): a, c, g, or t
ctagtctagannnnnagtttattcttgacannnnnnnnnnnnnntgrtataatnnnnaagtaataaaatattcggaggaattttgaaatggctgataaacaacgtaag

SEQ ID NO: 156 - DNA, 37 bp, Lactococcus lactis
  primer_bind (1)..(37): Primer 768
aattcctgcagcatattaaataatgaacaagtcattc

SEQ ID NO: 157 - DNA, 32 bp, Lactococcus lactis
  primer_bind (1)..(32): Primer 769
tagtggatcctggtaaatccaaacacaacaac

SEQ ID NO: 158 - DNA, 34 bp, Lactococcus lactis
  primer_bind (1)..(34): Primer 770
aattcctgcagtaatttccagctcttacaataac

SEQ ID NO: 159 - DNA, 31 bp, Lactococcus lactis
  primer_bind (1)..(31): Primer 771
gacctcgagtcagaaactttctttaccagag

SEQ ID NO: 160 - DNA, 21 bp, Lactococcus lactis
  primer_bind (1)..(21): Primer 772
gcggggatccactagttctag

SEQ ID NO: 161 - DNA, 17 bp, Lactococcus lactis
  primer_bind (1)..(17): Primer 773
ataccgtcgacctcgag

SEQ ID NO: 162 - DNA, 30 bp, Lactococcus lactis
  primer_bind (1)..(30): Primer 774
tagtggatccctgtttcaggtcttggatag

SEQ ID NO: 163 - DNA, 33 bp, Lactococcus lactis
  primer_bind (1)..(33): Primer 775
ccgatgaattctcattagcacgtttaacaagag

SEQ ID NO: 164 - DNA, 29 bp, Lactococcus lactis
  primer_bind (1)..(29): Primer 776
ccgatgaattcatcagcgtagtctgctgc

SEQ ID NO: 165 - DNA, 33 bp, Lactococcus lactis
  primer_bind (1)..(33): Primer 777
cggggtaccatttaatcctaaagtcgttattac

SEQ ID NO: 166 - DNA, 32 bp, Lactococcus lactis
  primer_bind (1)..(32): Primer 785
ccgatgaattcttaagtcaagacaacgaggtc

SEQ ID NO: 167 - DNA, 33 bp, Lactococcus lactis
  primer_bind (1)..(33): Primer 786
ccgatgaattcgaccttgttgaaaaaaatcttc

SEQ ID NO: 168 - DNA, 30 bp, Lactococcus lactis
  primer_bind (1)..(30): Primer 787
tagtggatccgtacaatggctactgttaac

SEQ ID NO: 169 - DNA, 33 bp, Lactococcus lactis
  primer_bind (1)..(33): Primer 788
gacctcgaggatgaacagacttttttattatag

SEQ ID NO: 170 - DNA, 20 bp, Lactococcus lactis
  primer_bind (1)..(20): Primer 789
aaaaccaggtgaaactcgtc

SEQ ID NO: 171 - DNA, 38 bp, Lactococcus lactis
  primer_bind (1)..(38): Primer 791
tcggactgcagttaaaatgctgataaaaacaattcttc

SEQ ID NO: 172 - DNA, 17 bp, Lactococcus lactis
  primer_bind (1)..(17): Primer 827
ataccgtcgacctcgag

SEQ ID NO: 173 - DNA, 22 bp, Lactococcus lactis
  primer_bind (1)..(22): Primer 828
cgataagcttgatatcgaattc

SEQ ID NO: 174 - DNA, 52 bp, Lactococcus lactis
  primer_bind (1)..(52): Primer 830
ccgatgaattctataaggagaattagaatggcaagtagtacattttatattc

SEQ ID NO: 175 - DNA, 21 bp, Lactococcus lactis
  Description of Combined DNA/RNA Molecule: oligonucleotide
  primer_bind (1)..(21): Primer 878
atccctcggttacaagtttcu

SEQ ID NO: 176 - DNA, 45 bp, Lactococcus lactis
  Description of Combined DNA/RNA Molecule: oligonucleotide
  primer_bind (1)..(45): Primer 879
agaaacttgtaaccgagggauaataatagattgaaattctgtcag

SEQ ID NO: 177 - DNA, 46 bp, Lactococcus lactis
  Description of Combined DNA/RNA Molecule: oligonucleotide
  primer_bind (1)..(46): Primer 880
attcgatatcaagcttatcgaucaaaaattgtggtagaatatatag

SEQ ID NO: 178 - DNA, 40 bp, Lactococcus lactis
  Description of Combined DNA/RNA Molecule: oligonucleotide
  primer_bind (1)..(40): Primer 881
aggtcgacggtatcgataaucctagttcaattgatgtgac

SEQ ID NO: 179 - DNA, 22 bp, Lactococcus lactis
  Description of Combined DNA/RNA Molecule: oligonucleotide
  primer_bind (1)..(22): Primer 882
atcgataagcttgatatcgaau

SEQ ID NO: 180 - DNA, 20 bp, Lactococcus lactis
  Description of Combined DNA/RNA Molecule: oligonucleotide
  primer_bind (1)..(20): Primer 883
attatcgataccgtcgaccu

SEQ ID NO: 181 - DNA, 48 bp, Lactococcus lactis
  Description of Combined DNA/RNA Molecule: oligonucleotide
  primer_bind (1)..(48): Primer 887
attcgatatcaagcttatcgauatttaaaaatgattgcaacatataac

SEQ ID NO: 182 - DNA, 24 bp, Lactococcus lactis
  Description of Combined DNA/RNA Molecule: oligonucleotide
  primer_bind (1)..(24): Primer 888
ataggtctcctttaaatgtaaaau

SEQ ID NO: 183 - DNA, 46 bp, Lactococcus lactis
  Description of Combined DNA/RNA Molecule: oligonucleotide
  primer_bind (1)..(46): Primer 889
attttacatttaaaggagacctautagaaatctatctgcttgatag

SEQ ID NO: 184 - DNA, 41 bp, Lactococcus lactis
  Description of Combined DNA/RNA Molecule: oligonucleotide
  primer_bind (1)..(41): Primer 890
aggtcgacggtatcgataacgucttcaccgtccattttgac

SEQ ID NO: 185 - DNA, 23 bp, Lactococcus lactis
  Description of Combined DNA/RNA Molecule: oligonucleotide
  primer_bind (1)..(23): Primer 891
acagattaaaggttgaccagtau

SEQ ID NO: 186 - DNA, 20 bp, Lactococcus lactis
  Description of Combined DNA/RNA Molecule: oligonucleotide
  primer_bind (1)..(20): Primer 892
accaattctgtgttgcgcau

SEQ ID NO: 187 - DNA, 95 bp, Lactococcus lactis
  Description of Combined DNA/RNA Molecule: oligonucleotide
  primer_bind (1)..(95): Primer 893
  modified_base (25)..(29): a, c, g, t or u
  modified_base (45)..(58): a, c, g, t or u
  modified_base (68)..(71): a, c, g, t or u
atgcgcaacacagaattgguggccnnnnnagtttattcttgacannnnnnnnnnnnnntgrtataatnnnnaagtaataaaatattcggaggaat

SEQ ID NO: 188 - DNA, 49 bp, Lactococcus lactis
  Description of Combined DNA/RNA Molecule: oligonucleotide
  primer_bind (1)..(49): Primer 894
atactggtcaacctttaatctguttaaaatgctgataaaaacaattctt

SEQ ID NO: 189 - DNA, 22 bp, Lactococcus lactis
  Description of Combined DNA/RNA Molecule: oligonucleotide
  primer_bind (1)..(22): Primer 920
ataagctugatatcgaattcct

SEQ ID NO: 190 - DNA, 22 bp, Lactococcus lactis
  Description of Combined DNA/RNA Molecule: oligonucleotide
  primer_bind (1)..(22): Primer 921
attcccttuagtgagggttaat

SEQ ID NO: 191 - DNA, 38 bp, Lactococcus lactis
  primer_bind (1)..(38): Primer 926
tcgacctcgagttttttatttttagtttttaactgcag

SEQ ID NO: 192 - DNA, 21 bp, Lactococcus lactis
  Description of Combined DNA/RNA Molecule: oligonucleotide
  primer_bind (1)..(21): Primer 927
atgtgtacgutctcctttgtg

SEQ ID NO: 193 - DNA, 32 bp, Lactococcus lactis
  Description of Combined DNA/RNA Molecule: oligonucleotide
  primer_bind (1)..(32): Primer 928
acgtacacauattatagtatttggaaccgaac

SEQ ID NO: 194 - DNA, 27 bp, Lactococcus lactis
  Description of Combined DNA/RNA Molecule: oligonucleotide
  primer_bind (1)..(27): Primer 929
aagcttauggtcgtcttgttacttgtg

SEQ ID NO: 195 - DNA, 28 bp, Lactococcus lactis
  Description of Combined DNA/RNA Molecule: oligonucleotide
  primer_bind (1)..(28): Primer 930
aaagggaautctgccggagctatatatg

SEQ ID NO: 196 - DNA, 24 bp, Lactococcus lactis
  primer_bind (1)..(24): Primer 975
ttaattatacaacattcctccatc

SEQ ID NO: 197 - DNA, 32 bp, Lactococcus lactis
  primer_bind (1)..(32): Primer 976
aattcctgcagatctatacctacttgaccagc

SEQ ID NO: 198 - DNA, 30 bp, Lactococcus lactis
  primer_bind (1)..(30): Primer 977
tagtggatccgagtattcgcaaaccttcag

SEQ ID NO: 199 - DNA, 35 bp, Lactococcus lactis
  primer_bind (1)..(35): Primer 978
aattcctgcagaataaatgaatgaggtaaggtcta

SEQ ID NO: 200 - DNA, 34 bp, Lactococcus lactis
  primer_bind (1)..(34): Primer 979
gacctcgagtttaagagataaaaggttaattgtg

SEQ ID NO: 201 - DNA, 57 bp, Lactococcus lactis
  primer_bind (1)..(57): Primer 991
gaatcggtaccaataaaatattcggaggaattttgaaatgttacgtcctgtagaaac

SEQ ID NO: 202 - DNA, 68 bp, Lactococcus lactis
  primer_bind (1)..(68): Primer 992
ggaccgtacgttaaaaaataaaaaagaacccactcgggttcttttttttattgtttgcctccctgctg

SEQ ID NO: 203 - DNA, 30 bp, Lactococcus lactis
  primer_bind (1)..(30): Primer 1057
tagtggatcccttaattgctggaatcactg

SEQ ID NO: 204 - DNA, 35 bp, Lactococcus lactis
  primer_bind (1)..(35): Primer 1058
aattcctgcagatgatatttctcttttctatctca

SEQ ID NO: 205 - DNA, 35 bp, Lactococcus lactis
  primer_bind (1)..(35): Primer 1059
aattcctgcagaattgcttaaatttctttagctac

SEQ ID NO: 206 - DNA, 30 bp, Lactococcus lactis
  primer_bind (1)..(30): Primer 1060
tcgacctcgagttagacgctcgggataaag

SEQ ID NO: 207 - DNA, 18 bp, Lactococcus lactis
  primer_bind (1)..(18): Primer 1112
gcaacaacgtgcgcaaac

SEQ ID NO: 208 - DNA, 17 bp, Lactococcus lactis
  primer_bind (1)..(17): Primer 1113
ctgcaggtcgactctag

SEQ ID NO: 209 - DNA, 22 bp, Lactococcus lactis
  primer_bind (1)..(22): Primer 1117
aatattttaggacccaatgatg

SEQ ID NO: 210 - DNA, 20 bp, Lactococcus lactis
  primer_bind (1)..(20): Primer 1119
cgagctggaaagcttttatc

SEQ ID NO: 211 - DNA, 109 bp, Lactococcus lactis
  primer_bind (1)..(109): Primer 1130
  modified_base (13)..(17): a, c, g, or t
  modified_base (33)..(46): a, c, g, or t
  modified_base (56)..(59): a, c, g, or t
ctagtctagagcnnnnnagtttattcttgacannnnnnnnnnnnnntgrtataatnnnnaagtaataaaatattcggaggaattttgaaatgaaactcgccgtttatag

SEQ ID NO: 212 - DNA, 32 bp, Lactococcus lactis
  primer_bind (1)..(32): Primer 1131
tcgacctcgagaagaatagaggatgaaaggtc

SEQ ID NO: 213 - DNA, 774 bp, Lactobacillus buchneri
  CDS (1)..(771): dar gene from Lactobacillus buchneri encoding acetoin reductase
atggcaaagcaagttgcattagttactggagcaggtcagggaattggtgaagccatcgcgactcgtcttcacgatgatggattcaatgttgccgttgttgatttgaacatcgacaatgccaacaaggtagccaagaagctttcaccagatggttctgaatcgattggcatcaaggccgacgtttccgaccgtgattcagtcatcgctgctgtaaacaaagccgtagatgaattcggcgacttcaacgtaatcgtcaataacgctggtctggggccaacgacaccaatcgatacgattacccccgatcaatttaaactcgtgtatggtgtcaacgtaggtggtgttctgtggggcatccaagctgcacatcaagcatttaagaaattaggccatggcggcaagattatcaacgctacttcacaagctggcgttgtcggtaatccaaacttggcattgtactcaggcaccaagtttgcggttcgaggcatcacccaggtggctgcccgtgacttggcagaagaaggcatcaccgcaaatgcttatgcaccaggaatcgtaaaaacaccaatgatgtttgatatcgcgcatcaagtcggtaagaacgccggcaaggacgatgagtggggcatgcagacattcgcaaaggatattgccctcaaacgtttgtcggagccggaagatgtggcagcagctgtatcattcttggcaggtaaggattcaaattatgttaccggacaaacgctgatcgtggatggcggaatgcaatttcaatag

SEQ ID NO: 214 - protein, 257 aa, Lactobacillus buchneri
MAKQVALVTGAGQGIGEAIATRLHDDGFNVAVVDLNIDNANKVAKKLSPDGSESIGIKADVSDRDSVIAAVNKAVDEFGDFNVIVNNAGLGPTTPIDTITPDQFKLVYGVNVGGVLWGIQAAHQAFKKLGHGGKIINATSQAGVVGNPNLALYSGTKFAVRGITQVAARDLAEEGITANAYAPGIVKTPMMFDIAHQVGKNAGKDDEWGMQTFAKDIALKRLSEPEDVAAAVSFLAGKDSNYVTGQTLIVDGGMQFQ

SEQ ID NO: 215 - DNA, 771 bp, Lactobacillus buchneri
  CDS (1)..(768): dar gene from Lactobacillus buchneri encoding acetoin reductase
atggcaaaattagcaattgtaactggcgcaggacaaggaatcggagaaggcatcgctcatcgactggcaaaagatgggttcgcgattgcagtcgcagatatcaatggggaaacagctgataaggtaaccgcagacttgactaacgacggctacactgccaaatcgtatcatatcgacgtggctgaccgcgaacgggtctttgaattagtgcaaaaagcggttgccgatcttggtgagcttgccgtgtacgtcaataatgccggggtggctttcatcaacgaaattgttgattccgcggaaaaagacatccggcgattattggatgtcaatttattaggaacttattggggaacccaggcggcggccgaacaattcaaaaaacagggtcacggtggtcgaatcgttaacgcggcctccctggccggtgttgaggcatctgctctgcaaagcgcttattcgatttcaaagtttggcgttcggggaattactcaagcagcttcgaaggaattggcaaaggaccaaatcaccgttaacgcttacgatccaggaattgtcagaacacctctaagagacggcatcgacaaacggaccgctgaaatcaaaggaatctctgtcgctgaacaacaaaaaaactgcctcagtgaaatctcactgggcagagaagcgacaccagaagacgttgccaaagtcgtttcgtggtttgcatcccctgatgccgcttatatcaccggccaatcaattctagtggatggtggcatgagatatcaatag

SEQ ID NO: 216 - protein, 256 aa, Lactobacillus buchneri
MAKLAIVTGAGQGIGEGIAHRLAKDGFAIAVADINGETADKVTADLTNDGYTAKSYHIDVADRERVFELVQKAVADLGELAVYVNNAGVAFINEIVDSAEKDIRRLLDVNLLGTYWGTQAAAEQFKKQGHGGRIVNAASLAGVEASALQSAYSISKFGVRGITQAASKELAKDQITVNAYDPGIVRTPLRDGIDKRTAEIKGISVAEQQKNCLSEISLGREATPEDVAKVVSWFASPDAAYITGQSILVDGGMRYQ

SEQ ID NO: 217 - DNA, 771 bp, Enterobacter cloacae
  CDS (1)..(768): dar gene from Enterobacter cloacae subsp. dissolvens encoding enzyme [E.C.1.1.1.304 and E.C.1.1.1.76 activity]
atgcaaaaagtagcattggtaacaggttcaggacaaggtattggtaaagctattgctcttcgtttggtaaaagatggatttgctgtagctattgcagattataatgatgaaacagctcgtgctgttgctgatgaaattattcgtaatggtggaaatgcagttgctgtaaaagttgatgtatctgatcgtgatcaagtttttgctgctgttgaaaaagcaagaactgctttaggtggatttaatgttattgtaaataatgcaggaattgctccatcaacacctattgaatctattactccagaaattgttgataaagtatataatattaatgttaaaggtgtaatttggggaatgcaagctgcaattgatgcttttcgaaaagaaggacatggtggaaaaattattaatgcatgttctcaagctggtcatacaggaaatccagaacttgcagtttattcatctagtaaatttgctgttagaggtttgacacaaactgctgcacgagatttagcacctcttggtattacagttaatgcttattgtccaggaattgttaaaactcctatgtgggcagaaattgatagacaagttagtgaagctgctggtaaacctttaggttatggaacagaaacttttgctaaacgtattactttgggaagattaagtgaaccagaagatgttgctgcatgtgtatcatatcttgcaggtcctgattcagattatatgactggacaaagtttattgattgatggtggtatggtatttaattaa

SEQ ID NO: 218 - protein, 256 aa, Enterobacter cloacae
MQKVALVTGSGQGIGKAIALRLVKDGFAVAIADYNDETARAVADEIIRNGGNAVAVKVDVSDRDQVFAAVEKARTALGGFNVIVNNAGIAPSTPIESITPEIVDKVYNINVKGVIWGMQAAIDAFRKEGHGGKIINACSQAGHTGNPELAVYSSSKFAVRGLTQTAARDLAPLGITVNAYCPGIVKTPMWAEIDRQVSEAAGKPLGYGTETFAKRITLGRLSEPEDVAACVSYLAGPDSDYMTGQSLLIDGGMVFN

SEQ ID NO: 219 - DNA, 771 bp, Klebsiella pneumoniae
  CDS (1)..(768): budC gene from Klebsiella pneumoniae strain CICC 10011 encoding an enzyme  [E.C.1.1.1.304 and E.C.1.1.1.76 activity]
atgaaaaaagtcgcacttgttaccggctcaggccaggggattggtaaagcgattgcgctgcgcctggtgaaagatggttttgccgtcgctatcgccgactacaacgatgagacggcgagagccgtcgccgatgaaatcatccgtaacggcggcaacgccgtcgccgtgaaggtggatgtctctgatcgcgaccaggtgtttgcggcggtggagaaagcccgcaccgcgctgggcggtttcaacgtgattgtgaataacgccgggattgcgccatctacgcccatcgaatccatcacgccggagattgtcgacaaggtctacaacatcaacgtgaaaggggtgatctggggtatgcaggccgcgattgacgcgtttcgcaaagaggggcacggcggcaaaatcatcaacgcctgctcccaggcgggccacaccggtaacccggaactggcggtgtacagctcaagtaaattcgcagtgcgcggcttaacccagaccgccgctcgggacctcgcgccgctggggatcaccgttaacgcctactgcccgggtatcgtgaaaacgccgatgtgggcggagattgaccgtcaggtgtccgaggcggcaggtaaaccgcttggttatggcaccgaaacctttgccaaacgcattacgcttggccgcctgtccgaaccggaagatgtcgctgcctgtgtttcatacctcgccgggccagactctgactacatgactggtcagtcgctcttgatcgacggcgggatggtgtttaactaa

SEQ ID NO: 220 - protein, 256 aa, Klebsiella pneumoniae
MKKVALVTGSGQGIGKAIALRLVKDGFAVAIADYNDETARAVADEIIRNGGNAVAVKVDVSDRDQVFAAVEKARTALGGFNVIVNNAGIAPSTPIESITPEIVDKVYNINVKGVIWGMQAAIDAFRKEGHGGKIINACSQAGHTGNPELAVYSSSKFAVRGLTQTAARDLAPLGITVNAYCPGIVKTPMWAEIDRQVSEAAGKPLGYGTETFAKRITLGRLSEPEDVAACVSYLAGPDSDYMTGQSLLIDGGMVFN

SEQ ID NO: 221 - DNA, 771 bp, Kluyvera intermedia
  CDS (1)..(768): BudC gene from Kluyvera intermedia budC/dar encoding enzyme [E.C.1.1.1.304 and E.C.1.1.1.76 activity]
atgcaaaaagtggctctcgtaaccggctcaggccaggggattggtaaagcaatagcgcttcgcctggtgaaagatggctttgccgtcgccattgccgactataacgatgcgacggtgaaggccgttgccgatgaaattatccgtaacggcggccatgccgtggccgtgaaggtggatgtctctgaccgcgagcaggtgtttgcggcggtagagaaagcccgcaacgcgctgggcggctttcacgttatcgtcaataacgccgggatcgcaccctctacgcccatcgaatccatcaccccggagattgtcgacaaagtttataacatcaacgtgaaaggggtgatctgggggattcaggcggcgattgaggcgtttcgcaaagaggggcacggcggcaagatcatcaatgcctgctcccaggcgggccacaccggtaacccggaactggccgtctacagttcaagtaaattcgcggtgcgcggcttaacccagaccgccgcacgggatcttgccccgttggggatcaccgttaacgcctactgcccggggattgtgaaaacgccaatgtgggcggaaatcgaccgtcaggtctctgaggcggcaggtaaaccgctcggctacggtactgaaacctttgccaaacgcattacgcttggccgcttatccgaaccggaagatgtagccgcctgcgtctcgtaccttgcagggccagactccgattacatgaccggccagtctctgctcatagatggtgggatggtgttcaattaa

SEQ ID NO: 222 - protein, 256 aa, Kluyvera intermedia
MQKVALVTGSGQGIGKAIALRLVKDGFAVAIADYNDATVKAVADEIIRNGGHAVAVKVDVSDREQVFAAVEKARNALGGFHVIVNNAGIAPSTPIESITPEIVDKVYNINVKGVIWGIQAAIEAFRKEGHGGKIINACSQAGHTGNPELAVYSSSKFAVRGLTQTAARDLAPLGITVNAYCPGIVKTPMWAEIDRQVSEAAGKPLGYGTETFAKRITLGRLSEPEDVAACVSYLAGPDSDYMTGQSLLIDGGMVFN

SEQ ID NO: 223 - DNA, 771 bp, Enterobacter cloacae
  CDS (1)..(768): BudC gene from Enterobacter cloacae encoding enzyme [E.C.1.1.1.304 and E.C.1.1.1.76 activity]
atgcaaaaagttgctctcgtaaccggctcaggccaggggattggtaaagcgattgcgctgcgcctggtgaaggatggctttgccgttgccattgccgactataacgatgagacggcaagagccgtcgccgatgaaatcatccgcaacggcggcaaggccgtcgccgtgaaggtggatgtctctgaccgcgagcaggtgtttgcggcggtggaaaaagcgcgcaccgcgctgggcggatttaacgtcatcgttaataacgccgggattgcgccgtccacgcctatcgaatccatcacgccagagattgtcgacaaggtctacaacatcaacgtgaaaggggtgatctggggtattcaggctgccatcgacgcgttccgcaaagaggggcacggcgggaagatcatcaacgcctgctcccaggcaggccacaccggcaacccggaactggccgtgtacagctccagcaagttcgcggttcgcggcttaacccagaccgcagcgcgagaccttgctccgctgggcatcaccgttaacgcctattgcccaggcatcgtcaaaacgccgatgtgggcagaaatcgaccgtcaggtctccgaggcggcgggcaaaccgcttggctacgggacggaaacttttgccaaacgcattacgctgggtcgtttgtccgagccggaagatgtcgccgcctgcgtttcatacctcgccgggccggattctgattacatgaccgggcaatccttattgattgatggtgggatggtgttcaactaa

SEQ ID NO: 224 - protein, 256 aa, Enterobacter cloacae
MQKVALVTGSGQGIGKAIALRLVKDGFAVAIADYNDETARAVADEIIRNGGKAVAVKVDVSDREQVFAAVEKARTALGGFNVIVNNAGIAPSTPIESITPEIVDKVYNINVKGVIWGIQAAIDAFRKEGHGGKIINACSQAGHTGNPELAVYSSSKFAVRGLTQTAARDLAPLGITVNAYCPGIVKTPMWAEIDRQVSEAAGKPLGYGTETFAKRITLGRLSEPEDVAACVSYLAGPDSDYMTGQSLLIDGGMVFN

SEQ ID NO: 225 - DNA, 53 bp, Artificial Sequence
  Description of Artificial Sequence: Synthetic oligonucleotide
  promoter (1)..(53)
atagattagtttattcttgacactacaagctaaatgtggtataatcccataga
